(19) United States
(12) Patent Application Publication
(10) Pub. No.: US 2026/0055412 A1
(43) Pub. Date: Feb. 26, 2026

(54) SIRNA TARGETING ANGPTL4, AND CONJUGATES AND USES THEREOF

(71) Applicant: LEADERNA THERAPEUTICS LTD., Sichuan (CN)

(72) Inventors: Zhaogui LIU, Sichuan (CN); Zhao WANG, Sichuan (CN); Jiehua ZHOU, Sichuan (CN); Jinqiao WAN, Sichuan (CN)

(21) Appl. No.: 19/185,311

(22) Filed: Apr. 22, 2025

(30) Foreign Application Priority Data
Apr. 26, 2024 (CN) 202410512777.X

(51) Int. Cl. C12N 15/113

(52) U.S. Cl. CPC C12N 15/1136; C12N 2310/14; C12N 2310/312; C12N 2310/315; C12N 2310/321; C12N 2310/322; C12N 2310/351

(57) ABSTRACT

The present invention provides an siRNA that inhibits angiopoietin-like 4 (ANGPTL4) gene expression, wherein the siRNA comprises a sense strand and an antisense strand, wherein the antisense strand comprises at least 17 continuous nucleotides that differ by no more than 4 nucleotides from the nucleotide sequences as shown in SEQ ID NO: 143, and the antisense strand is 17 to 30 nucleotides in length; the sense strand is 17 to 30 nucleotides in length and is at least partially complementary to the antisense strand. The siRNA, siRNA conjugate, and pharmaceutical composition provided in the present invention exhibit good stability, ANGPLT4 gene inhibitory activity, and immunostimulation, and can significantly reduce ANGPTL4 protein concentrations at the animal level.

### CROSS-REFERENCE TO RELATED APPLICATIONS

[0001] This application claims the benefit of priority under 35 U.S.C. § 119(a) to Chinese Patent Application No. 202410512777.X, filed on Apr. 26, 2024, the entire contents of which are hereby incorporated by reference.

### REFERENCE TO SEQUENCE LISTING

[0002] The instant application contains a Sequence Listing as an XML file entitled “BSP25431887US SEQ” created on Apr. 21, 2025 and having a size of 3,082 bytes.

### TECHNICAL FIELD

[0003] The present disclosure relates to an siRNA that inhibits angiopoietin-like 4 (ANGPTL4) gene expression, a conjugate thereof, a pharmaceutical composition thereof, and use thereof in the prevention and/or treatment of diseases related to dyslipidemia.

### BACKGROUND

[0004] Angiopoietin-like 4 (ANGPTL4), a member of the angiopoietin-like family, is a secreted protein primarily expressed in adipose and liver tissues before being secreted into the bloodstream. ANGPTL4 consists of 406 amino acids and mainly contains two functional domains: an N-terminal coiled-coil domain and a C-terminal fibrinogen-like domain, both of which are conserved domains of angiopoietin family members. ANGPTL4 commonly exists as oligomers, glycosylated forms, and various subtypes. In addition, ANGPTL4 also contains one asparagine glycosylation site, one cAMP/cGMP-dependent protein kinase phosphorylation site, two protein kinase C phosphorylation sites, four myristoylation sites, and four casein kinase II phosphorylation sites. Its expression is regulated by factors such as transforming growth factor-β (TGF-β), peroxisome proliferator-activated receptor δ (PPARδ), and hypoxia-inducible factor 1 alpha (HIF1α).

[0005] Growing evidence indicates that the biological function of ANGPTL4 plays a pivotal role in the pathogenesis of metabolic disorders, such as atherosclerosis, type 2 diabetes, fatty liver disease, and obesity. Notably, it can play a pivotal role in lipid metabolism in the blood and liver by inhibiting lipoprotein lipase (LPL) activity. Abnormal lipid metabolism in the liver leads to accumulation of triacylglycerol (TAG) and 1,2-diacylglycerol (DAG), thereby activating the PKCε signaling pathway, which suppresses insulin receptor activation and reduces hepatic insulin sensitivity. The decrease in hepatic insulin sensitivity inhibits the conversion of blood glucose into hepatic glycogen and promotes the dissimilation of glycogen into glucose, leading to elevated blood glucose levels. Multiple studies have demonstrated that ANGPTL4 expression is associated with lipid and glucose metabolism in vivo.

[0006] Type 2 diabetes and its complications exhibit a high incidence worldwide. According to the International Diabetes Federation, approximately 537 million adults (10%) are currently living with diabetes, a figure projected to rise to 643 million by 2023 and 783 million by 2045, 90% of whom have type 2 diabetes. In China, the Guidelines for the Prevention and Treatment of Type 2 Diabetes in China (2020 Edition) reported that the incidence of type 2 diabetes has risen to 11.2%. Despite continuous introduction of drugs for the treatment of type 2 diabetes in recent years, clinical glycemic control and patient compliance are still unsatisfactory. A research study published in the British Medical Journal in 2020 revealed that 49% of patients with type 2 diabetes received treatment in China, with merely 49.4% achieving glycated hemoglobin (HbA1c) targets. Moreover, existing drugs for the treatment of type 2 diabetes require a high frequency of administration, and most of the drugs need to be administered daily or even per meal, highlighting unmet needs for improved patient compliance.

[0007] Compared to conventional drugs, siRNA has the disadvantage of poor stability and susceptibility to nuclease degradation during systemic administration. Furthermore, attempts need to be made to avoid side effects such as off-target effects, immunostimulation, and cytotoxicity while further improving activity. Thus, there is an urgent need to develop more candidate siRNAs that are stable in the blood, have good bioactivity and low cytotoxicity, and can inhibit ANGPTL4 gene expression in a long-lasting manner. Concurrently, it is of necessity for clinical research and commercial feasibility to develop drugs that can effectively prevent and/or treat diseases related to abnormalities in lipid and glucose metabolism by utilizing these candidate siRNAs that inhibit ANGPTL4 gene expression.

### SUMMARY

[0008] The present disclosure provides a small interfering RNA (siRNA) preparation targeting ANGPTL4. By specifically binding to ANGPTL4 mRNA, the siRNA preparation is capable of disrupting normal translational templating of ANGPTL4 mRNA, which prevents the translation of ANGPTL4 protein, thus alleviating the inhibition of LPL activity, lowering TAG and DAG levels, attenuating the PKCε signaling pathway, enhancing insulin sensitivity, and improving lipid and glucose metabolism.

[0009] In one aspect, the present disclosure provides an siRNA that inhibits ANGPTL4 gene expression, wherein the siRNA comprises a sense strand and an antisense strand, wherein the antisense strand comprises at least 17 continuous nucleotides that differ by no more than 4 nucleotides from the nucleotide sequence as shown in any one of SEQ ID NOs: 1 to 211 and 663 to 665, and the antisense strand is 17 to 30 nucleotides in length; the sense strand is 17 to 30 nucleotides in length and is at least partially complementary to the antisense strand. In some embodiments, the antisense strand is 19 to 27 nucleotides in length, and the sense strand is 19 to 25 nucleotides in length.

[0010] In some embodiments, the antisense strand is 19 to 23 nucleotides in length, and the sense strand is 19 to 21 nucleotides in length.

[0011] In some embodiments, the antisense strand is 23 nucleotides in length, and the sense strand is 21 nucleotides in length. In some embodiments, the antisense strand is 22 nucleotides in length, and the sense strand is 20 nucleotides in length. In some embodiments, the antisense strand is 21 nucleotides in length, and the sense strand is 21 nucleotides in length. In some embodiments, the antisense strand is 21 nucleotides in length, and the sense strand is 19 nucleotides in length. In some embodiments, the antisense strand is 20 nucleotides in length, and the sense strand is 22 nucleotides in length. In some embodiments, the antisense strand is 20 nucleotides in length, and the sense strand is 20 nucleotides in length. In some embodiments, the antisense strand is 27 nucleotides in length, and the sense strand is 25 nucleotides in length. In some embodiments, the antisense strand is 19 nucleotides in length, and the sense strand is 19 nucleotides in length.

[0012] In some embodiments, the siRNA comprises an overhang of one or more single-stranded nucleotides, such as an overhang of 1, 2, 3, or 4 nucleotides. In some embodiments, the overhang may be present on the sense strand, the antisense strand, or any combination thereof. In some embodiments, the overhang may be present at the 5′ end, the 3′ end, or both ends of the antisense or sense strand of the siRNA.

[0013] In some embodiments, the siRNA comprises an overhang of 2 nucleotides at the 3′ end of the antisense strand.

[0014] In some embodiments, the siRNA comprises an overhang of 2 nucleotides at the 3′ end of the antisense strand, and the overhang is UU or GG.

[0015] In some embodiments, the siRNA comprises a blunt end. In some embodiments, the siRNA comprises at least one blunt end at the 5′ end of the antisense strand (or the 3′ end of the sense strand).

[0016] In some embodiments, the siRNA comprises two blunt ends.

[0017] In some embodiments, the antisense strand differs by no more than 4 nucleotides from any one of the nucleotide sequences as shown in SEQ ID NOs: 1 to 211 and 663 to 665. In some embodiments, the antisense strand differs by no more than 3 nucleotides from any one of the nucleotide sequences as shown in SEQ ID NOs: 1 to 211 and 663 to 665. In some embodiments, the antisense strand differs by no more than 2 nucleotides from any one of the nucleotide sequences as shown in SEQ ID NOs: 1 to 211 and 663 to 665. In some embodiments, the antisense strand differs by no more than 1 nucleotide from any one of the nucleotide sequences as shown in SEQ ID NOs: 1 to 211 and 663 to 665. In some embodiments, the antisense strand is any one of the nucleotide sequences as shown in SEQ ID NOs: 1 to 211 and 663 to 665.

[0018] In some embodiments, the sense strand has a mismatch of no more than 3 nucleotides with the antisense strand. In some embodiments, the sense strand has a mismatch of no more than 2 nucleotides with the antisense strand. In some embodiments, the sense strand has a mismatch of no more than 1 nucleotide with the antisense strand. In some embodiments, the sense strand is fully complementary to the antisense strand.

[0019] In some embodiments, there is an overhang of 2 nucleotides at the 3′ end of the sense strand. In some embodiments, the two nucleotides are reverse complementary to the first two nucleotides at the corresponding position of the starting nucleotide of the sense strand in the transcript as shown in NCBI Accession No. NM 139314.3.

[0020] In some embodiments, the sequence of the siRNA is selected from the sequences of duplex 1 to duplex 217.

[0021] In some embodiments, the sequence of the siRNA is selected from the sequences of duplex 143, duplex 144, duplex 146, duplex 147, duplex 148, duplex 149, duplex 209, duplex 210, duplex 211, duplex 212, duplex 213, duplex 214, duplex 215, duplex 216, and duplex 217.

[0022] In some embodiments, the siRNA comprises at least one modified nucleotide.

[0023] In some embodiments, all of the nucleotides in the sense strand and/or the antisense strand of the siRNA are modified nucleotides or nucleotide analogs.

[0024] In some embodiments, the modified nucleotide or nucleotide analog is selected from a 2′-methoxy nucleotide, a 2′-fluoro nucleotide, a 2′-deoxy nucleotide, a 2′,3′-seco nucleotide analog, a 2′-fluoroarabino nucleotide, a 2′-methoxyethyl nucleotide, a 2′-amino-modified nucleotide, a 2′-alkyl-modified nucleotide, a 3′-methoxy nucleotide, a 2′-allyl-modified nucleotide, a nucleotide comprising a phosphorothioate group, a nucleotide comprising a methylphosphonate group, a nucleotide comprising a 5′-phosphate, a nucleotide comprising a 5′-phosphate mimic, a glycol-modified nucleotide, an abasic nucleotide, a morpholino nucleotide, a threose nucleotide, a locked nucleotide, an unlocked nucleotide, a glycerol nucleotide, or a base-modified nucleotide.

[0025] In some embodiments, the 5′ and 3′ ends of the sense strand independently comprise 1 or 2 phosphorothioate linkages, respectively; and/or the 5′ and 3′ ends of the antisense strand independently comprise 1 or 2 phosphorothioate linkages, respectively.

[0026] In some embodiments, there is a phosphorothioate linkage between nucleotides at positions 1 and 2 from the 5′ end of the sense strand, between nucleotides at positions 2 and 3 from the 5′ end of the sense strand, between nucleotides at positions 1 and 2 from the 3′ end of the antisense strand, between nucleotides at positions 2 and 3 from the 3′ end of the antisense strand, between nucleotides at positions 1 and 2 from the 5′ end of the antisense strand, and between nucleotides at positions 2 and 3 from the 5′ end of the antisense strand.

[0027] In some embodiments, the antisense strand of the siRNA is 23 nucleotides in length, wherein the antisense strand comprises 3 to 10 2′-fluoro nucleotides (preferably at positions 2, 14, and 16; positions 2, 5, 14, and 16; positions 2, 6, 14, and 16; positions 2, 4, 6, 14, and 16; positions 2, 6, 9, 14, and 16; positions 2, 5, 6, 14, and 16; positions 2, 6, 10, 14, and 16; positions 2, 6, 12, 14, and 16; positions 2, 5, 10, 14, and 16; positions 2, 3, 12, 14, and 16; positions 2, 9, 12, 14, and 16; positions 2, 6, 8, 9, 14, and 16; positions 2, 3, 5, 12, 14, and 16; positions 2, 8, 9, 12, 14, and 16; positions 2, 7, 9, 12, 14, and 16; positions 2, 4, 6, 8, 10, 14, 16, 18 and 20; or positions 2, 4, 5, 6, 8, 10, 12, 14, 16, and 18 from the 5′ end), with the remaining positions being 2′-methoxy nucleotides; and the sense strand of the siRNA is 21 nucleotides in length, wherein positions 9, 10, and 11; positions 7, 9, 10, and 11; or positions 5, 7, 9, 10, and 11 from the 5′ end of the sense strand are 2′-fluoro nucleotides, optionally comprising a threose nucleotide at one position (preferably at position 1 from the 5′ end), optionally comprising a 2′-deoxy nucleotide at one position (preferably at position 7 from the 5′ end), with the remaining positions being 2′-methoxy nucleotides. In some embodiments, the antisense strand of the siRNA is the nucleotide sequence as shown in SEQ ID NO: 143, and the sense strand of the siRNA is the nucleotide sequence as shown in SEQ ID NO: 354.

[0028] In some embodiments, the antisense strand of the siRNA is 21 nucleotides in length, wherein the antisense strand comprises 3 to 10 2′-fluoro nucleotides (preferably at positions 2, 6, 14, and 16 from the 5′ end), and the remaining positions are 2′-methoxy nucleotides; the sense strand is 19 nucleotides in length, wherein positions 7, 8, and 9 from the 5′ end of the sense strand are 2′-fluoro nucleotides.

[0029] The antisense strand of the siRNA is 22 nucleotides in length, wherein the antisense strand comprises 3 to 10 2′-fluoro nucleotides (e.g., at positions 2, 6, 14, and 16 from the 5′ end), and the remaining positions are 2′-methoxy nucleotides; the sense strand is 20 nucleotides in length, wherein positions 6, 8, 9, and 10, or positions 8, 9, and 10 from the 5′ end are 2′-fluoro nucleotides.

[0030] In some embodiments, the first nucleotide at the 5′ end of the antisense strand is an (E)-vinylphosphonate-modified nucleotide.

[0031] In some embodiments, the sequence of the siRNA is selected from the sequence of one of the modified duplexes 1 to 21 as shown in Table 3.

[0032] In one aspect, the present disclosure further provides an siRNA conjugate, wherein the siRNA conjugate comprises the siRNA according to the present disclosure and a conjugate molecule.

[0033] In some embodiments, the siRNA conjugate comprises a linker-targeting ligand. In some embodiments, the targeting ligand comprises N-acetylgalactosamine. In some embodiments, the linker-targeting ligand is GalNAc (L96).

[0034] In some embodiments, the siRNA conjugate is selected from conjugate 1 to conjugate 242.

[0035] In some embodiments, the siRNA conjugate is selected from conjugate 1, conjugate 5, conjugate 15, conjugate 16, conjugate 17, conjugate 19, conjugate 21, conjugate 22, conjugate 23, conjugate 28, conjugate 92, conjugate 93, conjugate 120, conjugate 130, conjugate 133, conjugate 225, conjugate 227, conjugate 234, conjugate 235, conjugate 236, and conjugate 238.

[0036] In one aspect, the present disclosure further provides a method for preparing a conjugate, comprising the step of conjugating the siRNA according to the present disclosure with a conjugate molecule, thereby obtaining the conjugate.

[0037] In one aspect, the present disclosure further provides a pharmaceutical composition, comprising the siRNA according to the present disclosure and/or the siRNA conjugate according to the present disclosure, as well as a pharmaceutically acceptable carrier.

[0038] In some embodiments, the pharmaceutical composition further comprises a second therapeutic agent; more preferably, the second therapeutic agent is an oligonucleotide; further preferably, the second therapeutic agent is administered in the same or a different medicament as the siRNA or the conjugate.

[0039] In one aspect, the present disclosure provides a use of the siRNA, siRNA conjugate, and/or pharmaceutical composition according to the present disclosure in the manufacture of a medicament for treating and/or preventing a pathological condition or disease associated with overexpression of angiopoietin-like 4 (ANGPTL4) gene.

[0040] In some embodiments, the pathological condition or disease is a disease associated with dyslipidemia. In some embodiments, the disease associated with dyslipidemia is hyperlipidemia, hypertriglyceridemia, pancreatitis, familial chylomicronemia syndrome, diabetes, type 2 diabetes, heart disease, myocardial infarction, angina, or atherosclerosis.

[0041] The siRNA, siRNA conjugate, and pharmaceutical composition provided in the present disclosure exhibit good stability, excellent ANGPLT4 gene inhibitory activity, satisfactory cytotoxicity and immunostimulation, and can significantly reduce blood lipid levels.

[0042] In some embodiments, the ANGPLT4 gene targeted by the siRNA of the present disclosure has the sequence as shown in NCBI Accession No. NM 139314.3.

[0043] In the present disclosure, “siRNA” refers to an RNA or RNA-like (e.g., chemically modified RNA) oligonucleotide molecule capable of reducing or inhibiting the translation of a messenger RNA (mRNA) in a sequence-specific manner. The siRNA may function through an RNA interference mechanism (e.g., by inducing mRNA degradation via interaction with an mRNA interference pathway mechanism (RNA-induced silencing complex RISC) in mammalian cells), or any other mechanism or pathway. Although the term “siRNA drug” as used in the present disclosure is believed to primarily function through an RNA interference mechanism, the siRNA drug is not limited or restricted to any specific pathway or mechanism of action. siRNA drugs include, but are not limited to, single-stranded antisense oligonucleotides, small interfering RNA (siRNA), double-stranded RNA (dsRNA), microRNA (miRNA), short hairpin RNA (shRNA), and Dicer enzyme substrates. The siRNA drug according to the present disclosure consists of an oligonucleotide strand that is at least partially complementary to a target mRNA. In some embodiments, the siRNA drug according to the present disclosure is double-stranded and consists of an antisense strand and a sense strand that is at least partially complementary to the antisense strand.

[0044] The term “sequence” or “nucleotide sequence” refers to the order or arrangement of nucleobases or nucleotides, represented alphabetically using standard nucleotide nomenclature.

[0045] In the present disclosure, unless otherwise specified, C, G, U, A, and T represent the base composition of a nucleotide, including both modified and unmodified nucleotides; m represents that the nucleotide immediately to the right of the symbol m is a 2′-methoxy nucleotide; f represents that the nucleotide immediately to the right of the symbol f is a 2′-fluoro nucleotide; lowercase d represents that the nucleotide immediately to the right of the symbol d is a deoxyribonucleotide; gn represents that the nucleotide immediately to the right of the symbol gn is a glycerol nucleotide (GNA); tn represents that the nucleotide immediately to the right of the symbol tn is a threose nucleotide (TNA); symbol * represents that the two adjacent nucleotides flanking the symbol * are linked via a phosphorothioate linkage; eVP represents that the nucleotide immediately to the right is an (E)-vinylphosphonate-modified nucleotide; iab represents an inverted abasic residue. GalNAc (L96) refers to conjugation with the linker-targeting ligand moiety GalNAc (L96) at this position. Ser (GN) refers to conjugation with the linker-targeting ligand moiety Ser (GN) at this position.

[0046] In the present disclosure, unless otherwise specified, uppercase I represents the base composition of a base-modified nucleotide, wherein the base is

[chemical structure]

mI refers to inosine with a 2′-methoxy substitution on the ribose moiety; m6A represents the base composition of a base-modified nucleotide, wherein the base is

[chemical structure]

uppercase×represents the base composition of a base-modified nucleotide, wherein the base is

[chemical structure]

uppercase B represents the base composition of a base-modified nucleotide, wherein the base is

[chemical structure]

For nucleotides containing special bases as described above, unless otherwise specified, they all bear a 2′-methoxy substitution on the ribose moiety.

[0047] In the present disclosure, unless otherwise specified, the term “complementary” refers to the ability of a first oligonucleotide sequence to hybridize with a second oligonucleotide sequence and form a duplex structure under certain conditions. “At least partially complementary” means that the two sequences may be fully complementary or have no more than 5, 4, 3, or 2 mismatched base pairs in total while retaining the ability to hybridize under relevant conditions. Additionally, when two oligonucleotides are designed to hybridize with one or more single-stranded overhangs, such overhangs should not be considered mismatches for the purpose of determining complementarity. In the present disclosure, “complementary” sequences may also include or entirely consist of non-Watson-Crick base pairs and/or base pairs formed from non-natural and modified nucleotides for the purpose of meeting the above hybridization requirements. Such non-Watson-Crick base pairs include, but are not limited to, G:U wobble base pairs or Hoogsteen base pairs. Correspondingly, in the present disclosure, unless otherwise specified, “mismatch” refers to a situation in an siRNA duplex molecule where the bases at corresponding positions are not paired in a complementary manner.

[0048] In the present disclosure, unless otherwise specified, “nucleotide sequence variation” refers to a change in the type of nucleobase (A, U, G, C) at the same or a corresponding position compared to the original nucleotide sequence. For example, if a nucleobase in the original sequence is A, and the nucleobase at the same or a corresponding position is changed to U, C, or G, or the nucleotide is dT, dC, dG, etc., it is considered that there is a nucleotide sequence variation at this position. It should be noted herein that if, compared to the original nucleotide sequence, the nucleotide at the same or a corresponding position differs only in the presence or absence of modification or the type of modification, it is not considered that there is a nucleotide sequence variation at this position. For example, if a nucleobase in the original sequence is U, and the nucleotide at the same or a corresponding position is dT or another base-modified nucleotide (e.g., I, m6A, X, B), it is not considered that there is a nucleotide sequence variation at this position.

[0049] The term “sense strand” refers to the strand of an RNA molecule that carries a nucleotide sequence encoding the amino acid information of a protein, also known as the coding strand, plus strand, or positive strand, and the other nucleotide sequence that is complementary thereto is the antisense strand.

[0050] The term “antisense strand” refers to a strand that is substantially or essentially reverse complementary to a nucleotide sequence of the mRNA expressed by the target gene, wherein the nucleotide sequence is of the same length as the antisense strand.

[0051] In the present disclosure, unless otherwise specified, the term “pharmaceutically acceptable” means that carriers, vehicles, diluents, excipients, and/or salts/esters/hydrates formed therefrom are generally chemically or physically compatible with other ingredients comprising a pharmaceutical dosage form and are physiologically compatible with the receptor.

[0052] In the present disclosure, unless otherwise specified, the term “inhibition” refers to the down-regulation of the expression of a target gene due to siRNA-mediated degradation of the mRNA of the target gene. The “down-regulation” refers to a decrease in the target gene expression by 5%, 10%, 15%, 20%, 25%, 30%, 35%, 40%, 45%, 50%, 55%, 60%, 65%, 70%, 75%, 80%, 85%, 90%, 95%, or 99% or more, or even 100%, compared to the absence of siRNA treatment. A 100% decrease in the target gene expression indicates undetectable levels of the target gene expression.

[0053] In some embodiments, the siRNA may further comprise modified nucleotides as needed, and the modified nucleotides do not significantly impair or abolish the function of the siRNA to inhibit ANGPTL4 gene expression. Currently, various methods are available in the art for siRNA modification, including, for example, backbone modification (e.g., phosphate group modification), ribose group modification, and base modification (Watts, J. K., G. F. Deleavey, and M. J. Damha, Chemically modified siRNA: tools and applications. Drug Discov Today, 2008. 13(19-20): p. 842-55).

[0054] In some embodiments, at least one nucleotide in the sense strand or the antisense strand of the siRNA is a modified nucleotide. For example, the modified nucleotide is a nucleotide group in which the ribose group and optionally the phosphate group are modified, but is not limited thereto.

[0055] In some embodiments, all of the nucleotides in the sense strand and/or the antisense strand are modified nucleotides or nucleotide analogs.

[0056] In some embodiments, the modified nucleotide is selected from a 2′-methoxy nucleotide, a 2′-fluoro nucleotide, a 2′-deoxy nucleotide, a 2′,3′-seco nucleotide analog, a 2′-fluoroarabino nucleotide, a 2′-methoxyethyl nucleotide, a 2′-amino-modified nucleotide, a 2′-alkyl-modified nucleotide, a 3′-methoxy nucleotide, a 2′-allyl-modified nucleotide, a nucleotide comprising a phosphorothioate group, a nucleotide comprising a methylphosphonate group, a nucleotide comprising a 5′-phosphate, a nucleotide comprising a 5′-phosphate mimic, a glycol-modified nucleotide, an abasic nucleotide, a morpholino nucleotide, a threose nucleotide (TNA), a locked nucleotide (LNA), an unlocked nucleotide (UNA), a glycerol nucleotide (GNA), or a base-modified nucleotide, but the present disclosure is not limited thereto.

[0057] In some embodiments, the antisense strand of the siRNA is 23 nucleotides in length, wherein positions 2, 6, 14, and 16 from the 5′ end of the antisense strand are 2′-fluoro nucleotides, and the remaining positions are 2′-methoxy nucleotides; the sense strand of the siRNA is 21 nucleotides in length, wherein positions 7, 9, 10, and 11 from the 5′ end of the sense strand are 2′-fluoro nucleotides, and the remaining positions are 2′-methoxy nucleotides.

[0058] In some embodiments, the antisense strand of the siRNA is 23 nucleotides in length, wherein positions 2, 6, 8, 9, 14, and 16 from the 5′ end of the antisense strand are 2′-fluoro nucleotides, and the remaining positions are 2′-methoxy nucleotides; the sense strand of the siRNA is 21 nucleotides in length, wherein positions 7, 9, 10, and 11 from the 5′ end of the sense strand are 2′-fluoro nucleotides, and the remaining positions are 2′-methoxy nucleotides.

[0059] In some embodiments, the antisense strand of the siRNA is 23 nucleotides in length, wherein positions 2, 6, 14, and 16 from the 5′ end of the antisense strand are 2′-fluoro nucleotides, and the remaining positions are 2′-methoxy nucleotides; the sense strand of the siRNA is 21 nucleotides in length, wherein positions 9, 10, and 11 from the 5′ end of the sense strand are 2′-fluoro nucleotides, and the remaining positions are 2′-methoxy nucleotides.

[0060] In some embodiments, the antisense strand of the siRNA is 23 nucleotides in length, wherein positions 2, 6, 8, 9, 10, 14, and 16 from the 5′ end of the antisense strand are 2′-fluoro nucleotides, and the remaining positions are 2′-methoxy nucleotides; the sense strand of the siRNA is 21 nucleotides in length, wherein positions 7, 9, 10, and 11 from the 5′ end of the sense strand are 2′-fluoro nucleotides, and the remaining positions are 2′-methoxy nucleotides.

[0061] In some embodiments, the antisense strand of the siRNA is 23 nucleotides in length, wherein positions 2, 6, 8, 9, 10, 14, and 16 from the 5′ end of the antisense strand are 2′-fluoro nucleotides, and the remaining positions are 2′-methoxy nucleotides; the sense strand of the siRNA is 21 nucleotides in length, wherein positions 7, 9, 10, 11, and 15 from the 5′ end of the sense strand are 2′-fluoro nucleotides, and the remaining positions are 2′-methoxy nucleotides.

[0062] In some embodiments, the antisense strand of the siRNA is 23 nucleotides in length, wherein positions 2, 6, 10, 14, and 16 from the 5′ end of the antisense strand are 2′-fluoro nucleotides, and the remaining positions are 2′-methoxy nucleotides; the sense strand of the siRNA is 21 nucleotides in length, wherein positions 3, 7, 9, 10, and 11 from the 5′ end of the sense strand are 2′-fluoro nucleotides, and the remaining positions are 2′-methoxy nucleotides.

[0063] In some embodiments, the antisense strand of the siRNA is 23 nucleotides in length, wherein positions 2, 6, 14, and 16 from the 5′ end of the antisense strand are 2′-fluoro nucleotides, and the remaining positions are 2′-methoxy nucleotides; the sense strand of the siRNA is 21 nucleotides in length, wherein positions 7, 9, 10, and 11 from the 5′ end of the sense strand are 2′-fluoro nucleotides, and the remaining positions are 2′-methoxy nucleotides.

[0064] In some embodiments, the antisense strand of the siRNA is 23 nucleotides in length, wherein positions 2, 3, 4, 6, 8, 10, 14, 16, 18, 20, and 22 from the 5′ end of the antisense strand are 2′-fluoro nucleotides, and the remaining positions are 2′-methoxy nucleotides; the sense strand of the siRNA is 21 nucleotides in length, wherein position 2 from the 5′ end of the sense strand is a 2′-fluoro nucleotide, and the remaining positions are 2′-methoxy nucleotides.

[0065] In some embodiments, the antisense strand of the siRNA is 23 nucleotides in length, wherein positions 2, 4, 5, 6, 8, 10, 14, 16, 18, 20, and 22 from the 5′ end of the antisense strand are 2′-fluoro nucleotides, and the remaining positions are 2′-methoxy nucleotides; the sense strand of the siRNA is 21 nucleotides in length, wherein position 2 from the 5′ end of the sense strand is a 2′-fluoro nucleotide, and the remaining positions are 2′-methoxy nucleotides.

[0066] In some embodiments, the antisense strand of the siRNA is 23 nucleotides in length, wherein positions 2, 4, 6, 7, 8, 10, 14, 16, 18, 20, and 22 from the 5′ end of the antisense strand are 2′-fluoro nucleotides, and the remaining positions are 2′-methoxy nucleotides; the sense strand of the siRNA is 21 nucleotides in length, wherein position 2 from the 5′ end of the sense strand is a 2′-fluoro nucleotide, and the remaining positions are 2′-methoxy nucleotides.

[0067] In some embodiments, the antisense strand of the siRNA is 23 nucleotides in length, wherein positions 2, 4, 6, 8, 10, 14, 16, 18, and 20 from the 5′ end of the antisense strand are 2′-fluoro nucleotides, and the remaining positions are 2′-methoxy nucleotides; the sense strand of the siRNA is 21 nucleotides in length, wherein positions 1, 3, 5, 7, 9, 10, 11, 13, 15, 17, 19, and 21 from the 5′ end of the sense strand are 2′-fluoro nucleotides, and the remaining positions are 2′-methoxy nucleotides.

[0068] In some embodiments, the antisense strand of the siRNA is 23 nucleotides in length, wherein positions 2, 4, 6, 8, 10, 14, 16, 18, 20, and 22 from the 5′ end of the antisense strand are 2′-fluoro nucleotides, and the remaining positions are 2′-methoxy nucleotides; the sense strand of the siRNA is 21 nucleotides in length, wherein positions 1, 3, 5, 7, 9, 10, 11, 13, 15, 17, 19, and 21 from the 5′ end of the sense strand are 2′-fluoro nucleotides, and the remaining positions are 2′-methoxy nucleotides.

[0069] In some embodiments, the antisense strand of the siRNA is 23 nucleotides in length, wherein positions 2, 6, 8, 9, 14, and 16 from the 5′ end of the antisense strand are 2′-fluoro nucleotides, position 7 is a glycerol nucleotide (GNA), and the remaining positions are 2′-methoxy nucleotides; the sense strand of the siRNA is 21 nucleotides in length, wherein positions 7, 9, 10, and 11 from the 5′ end of the sense strand are 2′-fluoro nucleotides, and the remaining positions are 2′-methoxy nucleotides.

[0070] In some embodiments, the antisense strand of the siRNA is 23 nucleotides in length, wherein positions 2, 8, 9, 10, 14, and 16 from the 5′ end of the antisense strand are 2′-fluoro nucleotides, position 6 is a glycerol nucleotide (GNA), and the remaining positions are 2′-methoxy nucleotides; the sense strand of the siRNA is 21 nucleotides in length, wherein positions 7, 9, 10, 11, and 15 from the 5′ end of the sense strand are 2′-fluoro nucleotides, and the remaining positions are 2′-methoxy nucleotides.

[0071] In some embodiments, the antisense strand of the siRNA is 23 nucleotides in length, wherein positions 2, 8, 9, 10, 14, and 16 from the 5′ end of the antisense strand are 2′-fluoro nucleotides, position 4 is a glycerol nucleotide (GNA), and the remaining positions are 2′-methoxy nucleotides; the sense strand of the siRNA is 21 nucleotides in length, wherein positions 7, 9, 10, 11, and 15 from the 5′ end of the sense strand are 2′-fluoro nucleotides, and the remaining positions are 2′-methoxy nucleotides.

[0072] In some embodiments, the antisense strand of the siRNA is 23 nucleotides in length, wherein positions 2, 8, 9, 10, 14, and 16 from the 5′ end of the antisense strand are 2′-fluoro nucleotides, position 5 is a glycerol nucleotide (GNA), and the remaining positions are 2′-methoxy nucleotides; the sense strand of the siRNA is 21 nucleotides in length, wherein positions 7, 9, 10, 11, and 15 from the 5′ end of the sense strand are 2′-fluoro nucleotides, and the remaining positions are 2′-methoxy nucleotides.

[0073] In some embodiments, the antisense strand of the siRNA is 23 nucleotides in length, wherein positions 2, 8, 9, 10, 14, and 16 from the 5′ end of the antisense strand are 2′-fluoro nucleotides, position 7 is a glycerol nucleotide (GNA), and the remaining positions are 2′-methoxy nucleotides; the sense strand of the siRNA is 21 nucleotides in length, wherein positions 7, 9, 10, 11, and 15 from the 5′ end of the sense strand are 2′-fluoro nucleotides, and the remaining positions are 2′-methoxy nucleotides.

[0074] In some embodiments, the antisense strand of the siRNA is 23 nucleotides in length, wherein positions 2, 8, 9, 10, 14, and 16 from the 5′ end of the antisense strand are 2′-fluoro nucleotides, position 6 is a glycerol nucleotide (GNA), and the remaining positions are 2′-methoxy nucleotides; the sense strand of the siRNA is 21 nucleotides in length, wherein positions 9, 10, and 11 from the 5′ end of the sense strand are 2′-fluoro nucleotides, and the remaining positions are 2′-methoxy nucleotides.

[0075] In some embodiments, the antisense strand of the siRNA is 23 nucleotides in length, wherein positions 2, 5, 7, and 12 from the 5′ end of the antisense strand are 2′-deoxy nucleotides, position 14 is a 2′-fluoro nucleotide, and the remaining positions are 2′-methoxy nucleotides. In some embodiments, the sense strand of the siRNA is 21 nucleotides in length, wherein positions 9, 10, and 11 from the 5′ end of the sense strand are 2′-fluoro nucleotides, and the remaining positions are 2′-methoxy nucleotides.

[0076] In some embodiments, the antisense strand of the siRNA is 23 nucleotides in length, wherein positions 2, 5, 7, and 12 from the 5′ end of the antisense strand are 2′-deoxy nucleotides, positions 6, 8, 9, 10, 14, and 16 are 2′-fluoro nucleotides, and the remaining positions are 2′-methoxy nucleotides. In some embodiments, the sense strand of the siRNA is 21 nucleotides in length, wherein positions 7, 9, 10, and 11 from the 5′ end of the sense strand are 2′-fluoro nucleotides, and the remaining positions are 2′-methoxy nucleotides.

[0077] In some embodiments, the antisense strand of the siRNA is 21 nucleotides in length, wherein positions 2, 6, 14, and 16 from the 5′ end of the antisense strand are 2′-fluoro nucleotides, and the remaining positions are 2′-methoxy nucleotides; the sense strand of the siRNA is 21 nucleotides in length, wherein positions 5, 7, and 9 from the 5′ end of the sense strand are 2′-fluoro nucleotides, and the remaining positions are 2′-methoxy nucleotides.

[0078] In some embodiments, the antisense strand of the siRNA is 21 nucleotides in length, wherein positions 2, 6, 14, and 16 from the 5′ end of the antisense strand are 2′-fluoro nucleotides, and the remaining positions are 2′-methoxy nucleotides; the sense strand of the siRNA is 21 nucleotides in length, wherein positions 7, 9, 10, and 11 from the 5′ end of the sense strand are 2′-fluoro nucleotides, and the remaining positions are 2′-methoxy nucleotides.

[0079] In some embodiments, the antisense strand of the siRNA is 21 nucleotides in length, wherein positions 2, 4, 6, 8, 10, 12, 14, 16, 18, and 20 from the 5′ end of the antisense strand are 2′-fluoro nucleotides, and the remaining positions are 2′-methoxy nucleotides; the sense strand of the siRNA is 21 nucleotides in length, wherein positions 9, 10, and 11 from the 5′ end of the sense strand are 2′-fluoro nucleotides, and the remaining positions are 2′-methoxy nucleotides.

[0080] In some embodiments, the antisense strand of the siRNA is 21 nucleotides in length, wherein positions 2, 4, 6, 8, 10, 12, 14, 16, 18, and 20 from the 5′ end of the antisense strand are 2′-fluoro nucleotides, and the remaining positions are 2′-methoxy nucleotides; the sense strand of the siRNA is 21 nucleotides in length, wherein positions 1, 3, 5, 7, 9, 11, 13, 15, 17, 19, and 21 from the 5′ end of the sense strand are 2′-fluoro nucleotides, and the remaining positions are 2′-methoxy nucleotides.

[0081] In some embodiments, the antisense strand of the siRNA is 21 nucleotides in length, wherein positions 2, 6, 14, and 16 from the 5′ end of the antisense strand are 2′-fluoro nucleotides, and the remaining positions are 2′-methoxy nucleotides; the sense strand of the siRNA is 19 nucleotides in length, wherein positions 7, 8, and 9 from the 5′ end of the sense strand are 2′-fluoro nucleotides, and the remaining positions are 2′-methoxy nucleotides.

[0082] In some embodiments, the antisense strand of the siRNA is 19 nucleotides in length, wherein positions 2, 4, 6, 8, 10, 12, 14, 16, and 18 from the 5′ end of the antisense strand are 2′-fluoro nucleotides, and the remaining positions are 2′-methoxy nucleotides; the sense strand of the siRNA is 19 nucleotides in length, wherein positions 7, 8, and 9 from the 5′ end of the sense strand are 2′-fluoro nucleotides, and the remaining positions are 2′-methoxy nucleotides.

[0083] In some embodiments, the antisense strand of the siRNA is 23 nucleotides in length, wherein position 14 from the 5′ end of the antisense strand is a 2′-fluoro nucleotide, positions 2, 5, and 7 are 2′-deoxy nucleotides, position 12 is a threose nucleotide, and the remaining positions are 2′-methoxy nucleotides; the sense strand of the siRNA is 21 nucleotides in length, wherein positions 9, 10, and 11 from the 5′ end of the sense strand are 2′-fluoro nucleotides, and the remaining positions are 2′-methoxy nucleotides.

[0084] In some embodiments, the antisense strand of the siRNA is 23 nucleotides in length, wherein positions 2, 6, 14, and 16 from the 5′ end of the antisense strand are 2′-fluoro nucleotides, and the remaining positions are 2′-methoxy nucleotides; the sense strand of the siRNA is 21 nucleotides in length, wherein positions 9, 10, and 11 from the 5′ end of the sense strand are 2′-fluoro nucleotides, position 1 is a threose nucleotide, and the remaining positions are 2′-methoxy nucleotides.

[0085] In some embodiments, the antisense strand of the siRNA is 23 nucleotides in length, wherein positions 2, 6, 14, and 16 from the 5′ end of the antisense strand are 2′-fluoro nucleotides, position 22 is a threose nucleotide, and the remaining positions are 2′-methoxy nucleotides; the sense strand of the siRNA is 21 nucleotides in length, wherein positions 9, 10, and 11 from the 5′ end of the sense strand are 2′-fluoro nucleotides, and the remaining positions are 2′-methoxy nucleotides.

[0086] In some embodiments, the antisense strand of the siRNA is 23 nucleotides in length, wherein positions 2, 6, 14, and 16 from the 5′ end of the antisense strand are 2′-fluoro nucleotides, position 23 is a threose nucleotide, and the remaining positions are 2′-methoxy nucleotides; the sense strand of the siRNA is 21 nucleotides in length, wherein positions 9, 10, and 11 from the 5′ end of the sense strand are 2′-fluoro nucleotides, and the remaining positions are 2′-methoxy nucleotides.

[0087] In some embodiments, the antisense strand of the siRNA is 22 nucleotides in length, wherein positions 2, 6, 14, and 16 from the 5′ end of the antisense strand are 2′-fluoro nucleotides, and the remaining positions are 2′-methoxy nucleotides; the sense strand of the siRNA is 20 nucleotides in length, wherein positions 8, 9, and 10 from the 5′ end of the sense strand are 2′-fluoro nucleotides, position 1 is a threose nucleotide, and the remaining positions are 2′-methoxy nucleotides.

[0088] In some embodiments, the antisense strand of the siRNA is 22 nucleotides in length, wherein positions 2, 6, 14, and 16 from the 5′ end of the antisense strand are 2′-fluoro nucleotides, position 21 is a threose nucleotide, and the remaining positions are 2′-methoxy nucleotides; the sense strand of the siRNA is 20 nucleotides in length, wherein positions 8, 9, and 10 from the 5′ end of the sense strand are 2′-fluoro nucleotides, and the remaining positions are 2′-methoxy nucleotides.

[0089] In some embodiments, the antisense strand of the siRNA is 22 nucleotides in length, wherein positions 2, 6, 14, and 16 from the 5′ end of the antisense strand are 2′-fluoro nucleotides, position 22 is a threose nucleotide, and the remaining positions are 2′-methoxy nucleotides; the sense strand of the siRNA is 20 nucleotides in length, wherein positions 8, 9, and 10 from the 5′ end of the sense strand are 2′-fluoro nucleotides, and the remaining positions are 2′-methoxy nucleotides.

[0090] In some embodiments, the antisense strand of the siRNA is 22 nucleotides in length, wherein positions 2, 6, 14, and 16 from the 5′ end of the antisense strand are 2′-fluoro nucleotides, and the remaining positions are 2′-methoxy nucleotides; the sense strand of the siRNA is 20 nucleotides in length, wherein positions 8, 9, and 10 from the 5′ end of the sense strand are 2′-fluoro nucleotides, and the remaining positions are 2′-methoxy nucleotides.

[0091] In some embodiments, the antisense strand of the siRNA is 22 nucleotides in length, wherein positions 2, 6, 14, and 16 from the 5′ end of the antisense strand are 2′-fluoro nucleotides, and the remaining positions are 2′-methoxy nucleotides; the sense strand of the siRNA is 20 nucleotides in length, wherein positions 6, 8, 9, and 10 from the 5′ end of the sense strand are 2′-fluoro nucleotides, and the remaining positions are 2′-methoxy nucleotides.

[0092] In some embodiments, the antisense strand of the siRNA is 22 nucleotides in length, wherein positions 2, 6, 14, and 16 from the 5′ end of the antisense strand are 2′-fluoro nucleotides, and the remaining positions are 2′-methoxy nucleotides; the sense strand of the siRNA is 20 nucleotides in length, wherein positions 8, 9, and 10 from the 5′ end of the sense strand are 2′-fluoro nucleotides, position 6 is a 2′-deoxy nucleotide, and the remaining positions are 2′-methoxy nucleotides.

[0093] In some embodiments, the antisense strand of the siRNA is 22 nucleotides in length, wherein positions 2, 6, 8, 9, 14, and 16 from the 5′ end of the antisense strand are 2′-fluoro nucleotides, and the remaining positions are 2′-methoxy nucleotides; the sense strand of the siRNA is 20 nucleotides in length, wherein positions 6, 8, 9, and 10 from the 5′ end of the sense strand are 2′-fluoro nucleotides, and the remaining positions are 2′-methoxy nucleotides.

[0094] In some embodiments, the antisense strand of the siRNA is 21 nucleotides in length, wherein positions 2, 6, 14, and 16 from the 5′ end of the antisense strand are 2′-fluoro nucleotides, and the remaining positions are 2′-methoxy nucleotides; the sense strand of the siRNA is 19 nucleotides in length, wherein positions 7, 8, and 9 from the 5′ end of the sense strand are 2′-fluoro nucleotides, position 1 is a threose nucleotide, and the remaining positions are 2′-methoxy nucleotides.

[0095] In some embodiments, the antisense strand of the siRNA is 21 nucleotides in length, wherein positions 2, 6, 14, and 16 from the 5′ end of the antisense strand are 2′-fluoro nucleotides, position 20 is a threose nucleotide, and the remaining positions are 2′-methoxy nucleotides; the sense strand of the siRNA is 19 nucleotides in length, wherein positions 7, 8, and 9 from the 5′ end of the sense strand are 2′-fluoro nucleotides, and the remaining positions are 2′-methoxy nucleotides.

[0096] In some embodiments, the antisense strand of the siRNA is 21 nucleotides in length, wherein positions 2, 6, 14, and 16 from the 5′ end of the antisense strand are 2′-fluoro nucleotides, position 21 is a threose nucleotide, and the remaining positions are 2′-methoxy nucleotides; the sense strand of the siRNA is 19 nucleotides in length, wherein positions 7, 8, and 9 from the 5′ end of the sense strand are 2′-fluoro nucleotides, and the remaining positions are 2′-methoxy nucleotides.

[0097] In some embodiments, the modified nucleotide is a nucleotide in which the phosphate group is modified by a phosphorothioate group. That is, a non-bridging oxygen atom in a phosphodiester bond is substituted by a sulfur atom, thereby replacing the phosphodiester bond with a phosphorothioate bond.

[0098] In some embodiments, the 5′ and 3′ ends of the sense strand independently comprise 1 or 2 phosphorothioate linkages, respectively; and/or the 5′ and 3′ ends of the antisense strand independently comprise 1 or 2 phosphorothioate linkages, respectively.

[0099] In some embodiments, at least one of the following positions contains a phosphorothioate linkage: between nucleotides at positions 1 and 2 from the 5′ end of the sense strand, between nucleotides at positions 2 and 3 from the 5′ end of the sense strand, between nucleotides at positions 1 and 2 from the 3′ end of the sense strand, between nucleotides at positions 2 and 3 from the 3′ end of the sense strand, between nucleotides at positions 1 and 2 from the 3′ end of the antisense strand, between nucleotides at positions 2 and 3 from the 3′ end of the antisense strand, between nucleotides at positions 1 and 2 from the 5′ end of the antisense strand, and between nucleotides at positions 2 and 3 from the 5′ end of the antisense strand; preferably, at least four of these positions contain a phosphorothioate linkage; in some embodiments, at least six of these positions contain a phosphorothioate linkage; in some embodiments, all eight of these positions contain a phosphorothioate linkage.

[0100] In some embodiments, there is a phosphorothioate linkage between nucleotides at positions 1 and 2 and between nucleotides at positions 2 and 3 from the 5′ end of the sense strand.

[0101] In some embodiments, there is a phosphorothioate linkage between nucleotides at positions 1 and 2 and between nucleotides at positions 2 and 3 from the 5′ end of the sense strand, and there is a phosphorothioate linkage between nucleotides at positions 1 and 2 and between nucleotides at positions 2 and 3 from the 3′ end of the sense strand.

[0102] In some embodiments, there is a phosphorothioate linkage between nucleotides at positions 1 and 2 and between nucleotides at positions 2 and 3 from the 3′ end of the antisense strand, and there is a phosphorothioate linkage between nucleotides at positions 1 and 2 and between nucleotides at positions 2 and 3 from the 5′ end of the antisense strand.

[0103] In some embodiments, the sense strand may comprise one or more blocking residues or moieties, referred to as “capping residues”. A “capping residue” is a non-nucleotide compound or another moiety that can be incorporated at one or more ends of the nucleotide sequence of an siRNA. In some embodiments, the capping residue is present at the 5′ end, the 3′ end, or both the 5′ end and the 3′ end of the sense strand.

[0104] In some embodiments, an inverted abasic residue (iab) is added as a capping residue. See F. Czaudema, Nucleic Acids Res., 2003, 31(11), 2705-16. In some embodiments, the 5′ end and/or the 3′ end of the sense strand may comprise more than one inverted abasic deoxyribose moiety as a capping residue.

[0105] In some embodiments, one or more inverted abasic residues (iab) are added to the 3′ end of the sense strand. In some embodiments, one or more inverted abasic residues (iab) are added to the 5′ end of the sense strand. In some embodiments, one or more inverted abasic residues may be inserted between the linker-targeting ligand moiety and the nucleotide sequence of the sense strand of the siRNA. In some embodiments, one or more inverted abasic residues are included at or near one or more ends of the sense strand of the siRNA.

[0106] In some embodiments, one or more inverted abasic residues (iab) are added to the 5′ end of the sense strand. In some embodiments, one or more inverted abasic residues may be inserted between the linker-targeting ligand moiety and the nucleotide sequence of the sense strand of the siRNA.

[0107] The inverted abasic residues may be linked via phosphate, phosphorothioate, or other internucleotide linkages.

[0108] In some embodiments, the first nucleotide at the 5′ end of the antisense strand is selected from the following structures:

[chemical structure]

[0109] wherein Base is A, U, G, C, T, or another nucleotide base.

[0110] In some embodiments, the first nucleotide at the 5′ end of the antisense strand is selected from the following structures:

[chemical structure]

[0111] wherein Base is A, U, G, C, T, or another nucleotide base.

[0112] In some embodiments, the first nucleotide at the 5′ end of the antisense strand is an (E)-vinylphosphonate-modified nucleotide.

[0113] In some embodiments, the siRNA comprises at least one base-modified nucleotide.

[0114] In some embodiments, the base of the base-modified nucleotide is selected from the following structures:

[chemical structure]

[0115] In some embodiments, the base-modified nucleotides are located at positions 5, 6, 7, and 8 of the antisense strand of the siRNA.

[0116] In some embodiments, the base-modified nucleotides are located at the overhang of the single-stranded nucleotide of the siRNA.

[0117] Preferably, the antisense strand of the siRNA contains an overhang of 2 nucleotides, and the base-modified nucleotide is the first nucleotide at the overhang of the antisense strand of the siRNA.

[0118] Preferably, the antisense strand of the siRNA contains an overhang of 2 nucleotides, and the base-modified nucleotide is the second nucleotide at the overhang of the antisense strand of the siRNA.

[0119] In the present disclosure, unless otherwise specified, a “conjugation” refers to a covalent linkage between two or more chemical moieties; a “conjugate” refers to a compound formed by covalent linkage between chemical moieties; and an “siRNA conjugate” refers to a compound formed by covalent linkage of one or more chemical moieties to an siRNA. It should be noted herein that each chemical moiety may be directly linked to the siRNA or linked to the siRNA via a linker.

[0120] In the present disclosure, unless otherwise specified, the “−” in “linker-targeting ligand” refers to a covalent linkage between the linker and the targeting ligand.

[0121] In some embodiments, the siRNA of the present disclosure may be conjugated with a pharmaceutically acceptable conjugate molecule to form an siRNA conjugate. In some embodiments, the siRNA is covalently conjugated to the conjugate molecule. To minimize the possible effect of conjugation on siRNA activity, the conjugation site between the siRNA and the conjugation molecule may be at the 3′ or 5′ end of the sense strand of the siRNA, or at the 5′ end of the antisense strand of the siRNA. In some embodiments, the conjugation site between the siRNA and the conjugation molecule may also be within the internal sequence of the siRNA.

[0122] The pharmaceutically acceptable targeting ligand may be a targeting ligand conventionally used in the field of siRNA delivery, such as, but not limited to, one or more of the following targeting ligands or derivatives thereof: lipophilic molecules, such as cholesterol, bile acids, vitamins (e.g., vitamin E), lipid molecules with varying chain lengths; polymers, such as polyethylene glycol; polypeptides, such as cell penetrating peptides; aptamers; antibodies; quantum dots; carbohydrates such as lactose, polylactose, mannose, galactose, N-acetylgalactosamine (GalNAc); folate; or ligands for receptors expressed on hepatocytes, such as asialoglycoproteins, asialoglycoprotein residues, lipoproteins (e.g., high-density lipoprotein, low-density lipoprotein), glucagon, neurotransmitters (e.g., epinephrine), growth factors, transferrin.

[0123] In some embodiments, the targeting ligand is N-acetylgalactosamine.

[0124] In some embodiments, the targeting ligand is directly linked to the 3′ end of the sense strand of the siRNA. In some embodiments, the targeting ligand is directly linked to the 5′ end of the sense strand of the siRNA. In some embodiments, the targeting ligand is linked to the 3′ end of the sense strand of the siRNA via a linker. In some embodiments, the targeting ligand is linked to the 5′ end of the sense strand of the siRNA via a linker.

[0125] In some embodiments, the linker-targeting ligand moiety has the following structure:

[chemical structure]

[0126] wherein R is selected from hydrogen and an auxiliary group. In some embodiments, the auxiliary groups include, but are not limited to, long-chain alkyl groups, long-chain alkenyl groups, long-chain alkynyl groups, cholesterol groups, cholesterol-like groups, polyethylene glycol groups; in some embodiments, the auxiliary groups include, but are not limited to, polypeptides.

[0127] In some embodiments, the linker-targeting ligand moiety is GalNAc (L96) having the following structure:

[chemical structure]

[0128] In some embodiments, GalNAc (L96) is linked to the 3′ end of the sense strand of the siRNA.

[0129] In some embodiments, GalNAc (L96) is linked to an inverted abasic residue (iab) at the 3′ end of the sense strand of the siRNA.

[0130] The present disclosure further provides a pharmaceutical composition, comprising the siRNA according to the present disclosure as an active ingredient and a pharmaceutically acceptable carrier.

[0131] The term “pharmaceutically acceptable carrier” refers to a carrier for the administration of a therapeutic agent. Such carriers include, but are not limited to, saline, buffered saline, glucose, water, glycerol, ethanol, and combinations thereof. For orally administered drugs, pharmaceutically acceptable carriers include, but are not limited to, pharmaceutically acceptable excipients such as inert diluents, disintegrants, binders, lubricants, sweeteners, flavoring agents, colorants, and preservatives, as known to those skilled in the art.

[0132] Particularly, it may be contemplated that pharmaceutically acceptable carriers allow systemic administration of the siRNA or siRNA conjugate of the present disclosure. However, enteral administration, parenteral administration, and transdermal or transmucosal (e.g., insufflation, buccal, vaginal, anal) administration, as well as drug inhalation may also be contemplated as feasible methods for administering the compounds of the present disclosure to patients in need of medical intervention. When parenteral administration is employed, it may involve injection of the compounds of the present disclosure directly into or at least in close proximity to the diseased tissue. However, intravenous, intraarterial, subcutaneous, intramuscular, intraperitoneal, intradermal, intrathecal, and other administrations of the compounds of the present disclosure also fall within the technical expertise of a skilled personnel, such as an attending physician.

[0133] For intramuscular, subcutaneous, and intravenous use, the pharmaceutical composition of the present disclosure will generally be provided in a sterile aqueous solution or suspension buffered to an appropriate pH and isotonicity. In a preferred embodiment, the carrier consists solely of an aqueous buffer. In this context, “solely” means the absence of auxiliary agents or encapsulating substances that might affect or mediate the uptake of the siRNA in cells expressing the ANGPTL4 gene. Aqueous suspensions according to the present disclosure may include a suspending agent such as cellulose derivatives, sodium alginate, polyvinylpyrrolidone, and tragacanth, and a wetting agent such as lecithin. Suitable preservatives for aqueous suspensions include ethyl and n-propyl p-hydroxybenzoate. Pharmaceutical compositions useful according to the present disclosure also include encapsulated formulations to protect the siRNA from rapid clearance from the body, such as controlled-release formulations, including implants and microencapsulated delivery systems. Biodegradable, biocompatible polymers may be used, such as ethylene vinyl acetate, polyanhydrides, polyglycolic acid, collagen, polyorthoesters, and polylactic acid. Methods for preparing such formulations will be apparent to those skilled in the art. Liposomal suspensions may also be used as pharmaceutically acceptable carriers. These carriers can be prepared according to methods known to those skilled in the art, such as those described in PCT publication WO 91/06309, which is incorporated herein by reference.

[0134] In some embodiments of the present disclosure, the pharmaceutical composition comprises one siRNA according to the present disclosure. In some other embodiments of the present disclosure, the pharmaceutical composition comprises at least two siRNAs according to the present disclosure (e.g., but not limited to, 2, 3, 4, 5, 6, 7, 8, 9, 10, or more) as active ingredients. Preferably, the at least two siRNAs according to the present disclosure each target a different target sequence in the ANGPTL4 gene, thereby enabling simultaneous action against different target sequences to produce a synergistic effect. In this context, the term “different target sequences” means that the target sequences do not overlap, or that the number of overlapping continuous nucleotides between target sequences is less than 5 (e.g., 4, 3, 2, 1, or 0 overlapping continuous nucleotides). In this context, the at least two siRNAs according to the present disclosure may be present in any different ratios. Preferably, the at least two siRNAs according to the present disclosure may be present in a molar ratio of 1:100 to 100:1 relative to each other; more preferably, the at least two siRNAs according to the present disclosure may be present in a molar ratio of 1:10 to 10:1, 1:5 to 5:1, or 1:2 to 2:1 relative to each other. In some embodiments of the present disclosure, the at least two siRNAs according to the present disclosure are present in equal molar ratios.

### DETAILED DESCRIPTION OF THE PREFERRED EMBODIMENT

[0135] Those skilled in the art are aware that the siRNAs according to the present disclosure can be obtained by conventional siRNA preparation methods in the art (e.g., solid-phase synthesis and liquid-phase synthesis), wherein both solid-phase synthesis and liquid-phase synthesis are commercially available as custom services. Those skilled in the art are also fully aware that modified nucleotide groups can be introduced into the siRNAs according to the present disclosure by using nucleotide monomers with corresponding modifications. Methods for preparing nucleotide monomers with corresponding modifications are well known to those skilled in the art, and commercial monomers are also available on the market.

### Example 1: SiRNA Synthesis

[0136] For the sense and antisense strands of the siRNA sequences of the present disclosure as well as the sense and antisense strands of the modified duplexes, deoxynucleoside CPG was used as a solid-phase support. The sense strands were synthesized using the solid-phase support, while the antisense strands were synthesized using universal CPG.

[0137] A 48-channel synthesizer was used for sequence synthesis at a 0.2 μmol scale. Phosphoramidite monomers were used at a concentration of 0.05 M, with 0.3 M BTT as the activator.

[0138] Cleavage and deprotection were performed on sequences in a 1.5 mL tube, using AMA in the first step and triethylamine trihydrofluoride for 2′-deprotection in the second step. For sequences containing full 2′-modifications, hydrolysis with ammonia was required. The cleaved and deprotected sequences were precipitated using a mixture of acetone and ethanol (80:20) and dissolved in RNase-free water. The sequences were analyzed by LC-MS to determine accuracy, quantified by spectrophotometry, and assessed for purity by HPLC.

[0139] After HPLC purification, lyophilization, and quality control, the sequences were subjected to sodium acetate/alcohol precipitation for salt exchange. Desalting was performed using a 3 KD ultrafiltration tube, followed by spectrophotometric quantification of sense and antisense strands, which were mixed in a 1:1 ratio and annealed to form an siRNA duplex.

TABLE 1
Sense and antisense strand sequences of unmodified siRNA duplexes

| Duplex | 5′-sense-3′ | SEQ ID | 5′-antisense-3′ | SEQ ID |
|---|---|---|---|---|
| No. | (sense strand sequence) | NO | (antisense strand sequence) | NO |
| 1 | CCGUACCCUUCUCCACUUGGA | 212 | UCCAAGUGGAGAAGGGUACGGAG | 1 |
| 2 | CGUACCCUUCUCCACUUGGGA | 213 | UCCCAAGUGGAGAAGGGUACGGA | 2 |
| 3 | CUCUGGAGGCUGGUGGUUUGA | 214 | UCAAACCACCAGCCUCCAGAGAG | 3 |
| 4 | AGGCCACCACCAUGUUGAUCU | 215 | AGAUCAACAUGGUGGUGGCCUGC | 4 |
| 5 | ACUUGGGACCAGGAUCACGAU | 216 | AUCGUGAUCCUGGUCCCAAGUGG | 5 |
| 6 | UGAGGUCCUUCACAGCCUGCA | 217 | UGCAGGCUGUGAAGGACCUCAGG | 6 |
| 7 | CACUUGGGACCAGGAUCACGA | 218 | UCGUGAUCCUGGUCCCAAGUGGA | 7 |
| 8 | ACCCUUCUCCACUUGGGACCA | 219 | UGGUCCCAAGUGGAGAAGGGUAC | 8 |
| 9 | CCACUUGGGACCAGGAUCACA | 220 | UGUGAUCCUGGUCCCAAGUGGAG | 9 |
| 10 | GGCCACCACCAUGUUGAUCCA | 221 | UGGAUCAACAUGGUGGUGGCCUG | 10 |
| 11 | GGACCCUGAGGUCCUUCACAA | 222 | UUGUGAAGGACCUCAGGGUCCAC | 11 |
| 12 | AUCUUCUGGAAGACCUGGCGA | 223 | UCGCCAGGUCUUCCAGAAGAUUC | 12 |
| 13 | GUACUUCCGCUCCAUCCCACA | 224 | UGUGGGAUGGAGCGGAAGUACUG | 13 |
| 14 | AGGGAUUGCCAGGAGCUGUUU | 225 | AAACAGCUCCUGGCAAUCCCUGG | 14 |
| 15 | CCACCACCAUGUUGAUCCAGU | 226 | ACUGGAUCAACAUGGUGGUGGCC | 15 |
| 16 | GGGACCAGGAUCACGACCUCU | 227 | AGAGGUCGUGAUCCUGGUCCCAA | 16 |
| 17 | CUUCUCCACUUGGGACCAGGA | 228 | UCCUGGUCCCAAGUGGAGAAGGG | 17 |
| 18 | GCCACCACCAUGUUGAUCCAA | 229 | UUGGAUCAACAUGGUGGUGGCCU | 18 |
| 19 | UCUCCACUUGGGACCAGGAUU | 230 | AAUCCUGGUCCCAAGUGGAGAAG | 19 |
| 20 | GGCCAGUACUUCCGCUCCAUU | 231 | AAUGGAGCGGAAGUACUGGCCGU | 20 |
| 21 | ACUGCGCCAAGAGCCUCUCUA | 232 | UAGAGAGGCUCUUGGCGCAGUUC | 21 |
| 22 | CUUCCACAAGGUGGCCCAGCA | 233 | UGCUGGGCCACCUUGUGGAAGAG | 22 |
| 23 | ACAGCCUGCAGACACAACUCA | 234 | UGAGUUGUGUCUGCAGGCUGUGA | 23 |
| 24 | CCUGAGGUCCUUCACAGCCUA | 235 | UAGGCUGUGAAGGACCUCAGGGU | 24 |
| 25 | AGCAACUCUUCCACAAGGUGA | 236 | UCACCUUGUGGAAGAGUUGCUGG | 25 |
| 26 | CCCUUCUCCACUUGGGACCAA | 237 | UUGGUCCCAAGUGGAGAAGGGUA | 26 |
| 27 | ACGACCUCCGCAGGGACAAGA | 238 | UCUUGUCCCUGCGGAGGUCGUGA | 27 |
| 28 | ACUCUUCCACAAGGUGGCCCA | 239 | UGGGCCACCUUGUGGAAGAGUUG | 28 |
| 29 | GCAGACACAACUCAAGGCUCA | 240 | UGAGCCUUGAGUUGUGUCUGCAG | 29 |
| 30 | UCCACUUGGGACCAGGAUCAU | 241 | AUGAUCCUGGUCCCAAGUGGAGA | 30 |
| 31 | CACGACCUCCGCAGGGACAAA | 242 | UUUGUCCCUGCGGAGGUCGUGAU | 31 |
| 32 | CAGGCCACCACCAUGUUGAUU | 243 | AAUCAACAUGGUGGUGGCCUGCA | 32 |
| 33 | AGAAGCAGCACCUGCGAAUUU | 244 | AAAUUCGCAGGUGCUGCUUCUCC | 33 |
| 34 | AGCAGCACCUGCGAAUUCAGU | 245 | ACUGAAUUCGCAGGUGCUGCUUC | 34 |
| 35 | GAAGCAGCACCUGCGAAUUCA | 246 | UGAAUUCGCAGGUGCUGCUUCUC | 35 |
| 36 | ACCACCAUGUUGAUCCAGCCU | 247 | AGGCUGGAUCAACAUGGUGGUGG | 36 |
| 37 | GGAUCCAGCAACUCUUCCACA | 248 | UGUGGAAGAGUUGCUGGAUCCUG | 37 |
| 38 | CCAGCAACUCUUCCACAAGGU | 249 | ACCUUGUGGAAGAGUUGCUGGAU | 38 |
| 39 | CAGACACAACUCAAGGCUCAA | 250 | UUGAGCCUUGAGUUGUGUCUGCA | 39 |
| 40 | CCUCUCUGGAGGCUGGUGGUU | 251 | AACCACCAGCCUCCAGAGAGGCU | 40 |
| 41 | UGCAGGCCACCACCAUGUUGA | 252 | UCAACAUGGUGGUGGCCUGCAGC | 41 |
| 42 | CCACCAUGUUGAUCCAGCCCA | 253 | UGGGCUGGAUCAACAUGGUGGUG | 42 |
| 43 | GCAGCACCUGCGAAUUCAGCA | 254 | UGCUGAAUUCGCAGGUGCUGCUU | 43 |
| 44 | AGAACUGCGCCAAGAGCCUCU | 255 | AGAGGCUCUUGGCGCAGUUCUUG | 44 |
| 45 | CCUGCAGCCAUUCCAACCUCA | 256 | UGAGGUUGGAAUGGCUGCAGGUG | 45 |
| 46 | GCAGGCCACCACCAUGUUGAU | 257 | AUCAACAUGGUGGUGGCCUGCAG | 46 |
| 47 | CAACUCAAGGCUCAGAACAGU | 258 | ACUGUUCUGAGCCUUGAGUUGUG | 47 |
| 48 | CUUCCGCUCCAUCCCACAGCA | 259 | UGCUGUGGGAUGGAGCGGAAGUA | 48 |
| 49 | CUCAGAACAGCAGGAUCCAGU | 260 | ACUGGAUCCUGCUGUUCUGAGCC | 49 |
| 50 | CUCUUCCACAAGGUGGCCCAA | 261 | UUGGGCCACCUUGUGGAAGAGUU | 50 |
| 51 | AGAGCCUCUCUGGAGGCUGGU | 262 | ACCAGCCUCCAGAGAGGCUCUUG | 51 |
| 52 | GAGCCUCUCUGGAGGCUGGUA | 263 | UACCAGCCUCCAGAGAGGCUCUU | 52 |
| 53 | GCUCAGAACAGCAGGAUCCAA | 264 | UUGGAUCCUGCUGUUCUGAGCCU | 53 |
| 54 | GAGGCUGGUGGUUUGGCACCU | 265 | AGGUGCCAAACCACCAGCCUCCA | 54 |
| 55 | GAACUGCGCCAAGAGCCUCUU | 266 | AAGAGGCUCUUGGCGCAGUUCUU | 55 |
| 56 | AAGAACUGCGCCAAGAGCCUU | 267 | AAGGCUCUUGGCGCAGUUCUUGU | 56 |
| 57 | CUUCACAGCCUGCAGACACAA | 268 | UUGUGUCUGCAGGCUGUGAAGGA | 57 |
| 58 | UCACGACCUCCGCAGGGACAA | 269 | UUGUCCCUGCGGAGGUCGUGAUC | 58 |
| 59 | AGACACAACUCAAGGCUCAGA | 270 | UCUGAGCCUUGAGUUGUGUCUGC | 59 |
| 60 | AGAACAGCAGGAUCCAGCAAU | 271 | AUUGCUGGAUCCUGCUGUUCUGA | 60 |
| 61 | GUGGUUUGGCACCUGCAGCCA | 272 | UGGCUGCAGGUGCCAAACCACCA | 61 |
| 62 | CCACAAGGUGGCCCAGCAGCA | 273 | UGCUGCUGGGCCACCUUGUGGAA | 62 |
| 63 | CCUCCGCAGGGACAAGAACUA | 274 | UAGUUCUUGUCCCUGCGGAGGUC | 63 |
| 64 | CGACCUCCGCAGGGACAAGAA | 275 | UUCUUGUCCCUGCGGAGGUCGUG | 64 |
| 65 | ACAACUCAAGGCUCAGAACAA | 276 | UUGUUCUGAGCCUUGAGUUGUGU | 65 |
| 66 | CAAGAACUGCGCCAAGAGCCU | 277 | AGGCUCUUGGCGCAGUUCUUGUC | 66 |
| 67 | ACACAACUCAAGGCUCAGAAU | 278 | AUUCUGAGCCUUGAGUUGUGUCU | 67 |
| 68 | GCUGGUGGUUUGGCACCUGCA | 279 | UGCAGGUGCCAAACCACCAGCCU | 68 |
| 69 | GACCUCCGCAGGGACAAGAAU | 280 | AUUCUUGUCCCUGCGGAGGUCGU | 69 |
| 70 | CUCCGCAGGGACAAGAACUGU | 281 | ACAGUUCUUGUCCCUGCGGAGGU | 70 |
| 71 | CAAGGCUCAGAACAGCAGGAU | 282 | AUCCUGCUGUUCUGAGCCUUGAG | 71 |
| 72 | AAGCCUGCCCGAAGAAAGAGA | 283 | UCUCUUUCUUCGGGCAGGCUUGG | 72 |
| 73 | CAAGCCUGCCCGAAGAAAGAA | 284 | UUCUUUCUUCGGGCAGGCUUGGC | 73 |
| 74 | GACACAACUCAAGGCUCAGAA | 285 | UUCUGAGCCUUGAGUUGUGUCUG | 74 |
| 75 | AGCCUGCCCGAAGAAAGAGGU | 286 | ACCUCUUUCUUCGGGCAGGCUUG | 75 |
| 76 | ACUCAAGGCUCAGAACAGCAA | 287 | UUGCUGUUCUGAGCCUUGAGUUG | 76 |
| 77 | GGCCAAGCCUGCCCGAAGAAA | 288 | UUUCUUCGGGCAGGCUUGGCCAC | 77 |
| 78 | ACAGCAGGAUCCAGCAACUCU | 289 | AGAGUUGCUGGAUCCUGCUGUUC | 78 |
| 79 | GCCAAGCCUGCCCGAAGAAAA | 290 | UUUUCUUCGGGCAGGCUUGGCCA | 79 |
| 80 | CCAAGCCUGCCCGAAGAAAGA | 291 | UCUUUCUUCGGGCAGGCUUGGCC | 80 |
| 81 | UCAAGGCUCAGAACAGCAGGA | 292 | UCCUGCUGUUCUGAGCCUUGAGU | 81 |
| 82 | GGACAAGAACUGCGCCAAGAA | 293 | UUCUUGGCGCAGUUCUUGUCCCU | 82 |
| 83 | CUCAAGGCUCAGAACAGCAGA | 294 | UCUGCUGUUCUGAGCCUUGAGUU | 83 |
| 84 | AACAGCAGGAUCCAGCAACUU | 295 | AAGUUGCUGGAUCCUGCUGUUCU | 84 |
| 85 | GCCUGCCCGAAGAAAGAGGCU | 296 | AGCCUCUUUCUUCGGGCAGGCUU | 85 |
| 86 | AAGACGGUGACUCUUGGCUCU | 297 | AGAGCCAAGAGUCACCGUCUUUC | 86 |
| 87 | AGACGGUGACUCUUGGCUCUA | 298 | UAGAGCCAAGAGUCACCGUCUUU | 87 |
| 88 | UUGGCUCUGCCCGAGGAUGUA | 299 | UACAUCCUCGGGCAGAGCCAAGA | 88 |
| 89 | UGGCUCUGCCCGAGGAUGUGA | 300 | UCACAUCCUCGGGCAGAGCCAAG | 89 |
| 90 | CCAAGGAGGGGCCAUCUGGAA | 301 | UUCCAGAUGGCCCCUCCUUGGAG | 90 |
| 91 | AGGAGGGGCCAUCUGGAAACU | 302 | AGUUUCCAGAUGGCCCCUCCUUG | 91 |
| 92 | GGAGGGGCCAUCUGGAAACUU | 303 | AAGUUUCCAGAUGGCCCCUCCUU | 92 |
| 93 | GAGGGGCCAUCUGGAAACUUA | 304 | UAAGUUUCCAGAUGGCCCCUCCU | 93 |
| 94 | GAAACUUGUGGACAGAGAAGA | 305 | UCUUCUCUGUCCACAAGUUUCCA | 94 |
| 95 | UGUGGACAGAGAAGAAGACCA | 306 | UGGUCUUCUUCUCUGUCCACAAG | 95 |
| 96 | GAAGAAGACCACGACUGGAGA | 307 | UCUCCAGUCGUGGUCUUCUUCUC | 96 |
| 97 | AAGAAGACCACGACUGGAGAA | 308 | UUCUCCAGUCGUGGUCUUCUUCU | 97 |
| 98 | AUGCGUUGCCUCCUGAGAUCA | 309 | UGAUCUCAGGAGGCAACGCAUGC | 98 |
| 99 | CCUCCUGAGAUCGAGGCUGCA | 310 | UGCAGCCUCGAUCUCAGGAGGCA | 99 |
| 100 | CUCCUGAGAUCGAGGCUGCAA | 311 | UUGCAGCCUCGAUCUCAGGAGGC | 100 |
| 101 | CCUGAGAUCGAGGCUGCAGGA | 312 | UCCUGCAGCCUCGAUCUCAGGAG | 101 |
| 102 | CUGAGAUCGAGGCUGCAGGAU | 313 | AUCCUGCAGCCUCGAUCUCAGGA | 102 |
| 103 | UGAGAUCGAGGCUGCAGGAUA | 314 | UAUCCUGCAGCCUCGAUCUCAGG | 103 |
| 104 | AGGCGUGGACCAAGGGGCAUA | 315 | UAUGCCCCUUGGUCCACGCCUCU | 104 |
| 105 | GGACCAAGGGGCAUGGAGCUU | 316 | AAGCUCCAUGCCCCUUGGUCCAC | 105 |
| 106 | GACCAAGGGGCAUGGAGCUUU | 317 | AAAGCUCCAUGCCCCUUGGUCCA | 106 |
| 107 | ACCAAGGGGCAUGGAGCUUCA | 318 | UGAAGCUCCAUGCCCCUUGGUCC | 107 |
| 108 | CCAAGGGGCAUGGAGCUUCAU | 319 | AUGAAGCUCCAUGCCCCUUGGUC | 108 |
| 109 | CAAGGGGCAUGGAGCUUCACU | 320 | AGUGAAGCUCCAUGCCCCUUGGU | 109 |
| 110 | AAGGGGCAUGGAGCUUCACUU | 321 | AAGUGAAGCUCCAUGCCCCUUGG | 110 |
| 111 | AGGGGCAUGGAGCUUCACUCU | 322 | AGAGUGAAGCUCCAUGCCCCUUG | 111 |
| 112 | GGGGCAUGGAGCUUCACUCCU | 323 | AGGAGUGAAGCUCCAUGCCCCUU | 112 |
| 113 | GGGCAUGGAGCUUCACUCCUU | 324 | AAGGAGUGAAGCUCCAUGCCCCU | 113 |
| 114 | GGCAUGGAGCUUCACUCCUUA | 325 | UAAGGAGUGAAGCUCCAUGCCCC | 114 |
| 115 | GAGCUUCACUCCUUGCUGGCU | 326 | AGCCAGCAAGGAGUGAAGCUCCA | 115 |
| 116 | AGCUUCACUCCUUGCUGGCCA | 327 | UGGCCAGCAAGGAGUGAAGCUCC | 116 |
| 117 | CUCCUUGCUGGCCAGGGAGUU | 328 | AACUCCCUGGCCAGCAAGGAGUG | 117 |
| 118 | UCCUUGCUGGCCAGGGAGUUA | 329 | UAACUCCCUGGCCAGCAAGGAGU | 118 |
| 119 | GCCAGGGAGUUGGGGACUCAA | 330 | UUGAGUCCCCAACUCCCUGGCCA | 119 |
| 120 | AGGGAGUUGGGGACUCAGAGA | 331 | UCUCUGAGUCCCCAACUCCCUGG | 120 |
| 121 | GGAGUUGGGGACUCAGAGGGA | 332 | UCCCUCUGAGUCCCCAACUCCCU | 121 |
| 122 | GAGUUGGGGACUCAGAGGGAU | 333 | AUCCCUCUGAGUCCCCAACUCCC | 122 |
| 123 | UUGGGGACUCAGAGGGACCAU | 334 | AUGGUCCCUCUGAGUCCCCAACU | 123 |
| 124 | CUCAGAGGGACCACUUGGGGU | 335 | ACCCCAAGUGGUCCCUCUGAGUC | 124 |
| 125 | AAUGGCGGACUCAGUCACAUU | 336 | AAUGUGACUGAGUCCGCCAUUGA | 125 |
| 126 | AUGGCGGACUCAGUCACAUUA | 337 | UAAUGUGACUGAGUCCGCCAUUG | 126 |
| 127 | UGGCGGACUCAGUCACAUUGA | 338 | UCAAUGUGACUGAGUCCGCCAUU | 127 |
| 128 | GGCGGACUCAGUCACAUUGAU | 339 | AUCAAUGUGACUGAGUCCGCCAU | 128 |
| 129 | GACUCAGUCACAUUGACUGAU | 340 | AUCAGUCAAUGUGACUGAGUCCG | 129 |
| 130 | ACUCAGUCACAUUGACUGACA | 341 | UGUCAGUCAAUGUGACUGAGUCC | 130 |
| 131 | GUCACAUUGACUGACGGGGAU | 342 | AUCCCCGUCAGUCAAUGUGACUG | 131 |
| 132 | CACAUUGACUGACGGGGACCA | 343 | UGGUCCCCGUCAGUCAAUGUGAC | 132 |
| 133 | CUGGUGCUGUUGUGUGUAGGU | 344 | ACCUACACACAACAGCACCAGCA | 133 |
| 134 | UGGUGCUGUUGUGUGUAGGUU | 345 | AACCUACACACAACAGCACCAGC | 134 |
| 135 | GCUGUUGUGUGUAGGUCCCCU | 346 | AGGGGACCUACACACAACAGCAC | 135 |
| 136 | CUGUUGUGUGUAGGUCCCCUA | 347 | UAGGGGACCUACACACAACAGCA | 136 |
| 137 | GUUGUGUGUAGGUCCCCUGGA | 348 | UCCAGGGGACCUACACACAACAG | 137 |
| 138 | UGUGUGUAGGUCCCCUGGGGA | 349 | UCCCCAGGGGACCUACACACAAC | 138 |
| 139 | GUGUGUAGGUCCCCUGGGGAU | 350 | AUCCCCAGGGGACCUACACACAA | 139 |
| 140 | ACAAGCAGGCGCCAAUGGUAU | 351 | AUACCAUUGGCGCCUGCUUGUGU | 140 |
| 141 | AAGCAGGCGCCAAUGGUAUCU | 352 | AGAUACCAUUGGCGCCUGCUUGU | 141 |
| 142 | GGCGCCAAUGGUAUCUGGGCA | 353 | UGCCCAGAUACCAUUGGCGCCUG | 142 |
| 143 | AGUUCUUGGAAUAAAAGCAAU | 354 | AUUGCUUUUAUUCCAAGAACUCU | 143 |
| 144 | GUUCUUGGAAUAAAAGCAACU | 355 | AGUUGCUUUUAUUCCAAGAACUC | 144 |
| 145 | UUCUUGGAAUAAAAGCAACCU | 356 | AGGUUGCUUUUAUUCCAAGAACU | 145 |
| 146 | UCUUGGAAUAAAAGCAACCUU | 357 | AAGGUUGCUUUUAUUCCAAGAAC | 146 |
| 147 | GGAAUAAAAGCAACCUCAGAA | 358 | UUCUGAGGUUGCUUUUAUUCCAA | 147 |
| 148 | GAAUAAAAGCAACCUCAGAAU | 359 | AUUCUGAGGUUGCUUUUAUUCCA | 148 |
| 149 | AAUAAAAGCAACCUCAGAACA | 360 | UGUUCUGAGGUUGCUUUUAUUCC | 149 |
| 150 | GUCCCAGGCCCACGAAAGACA | 361 | UGUCUUUCGUGGGCCUGGGACCA | 150 |
| 151 | AGGCCCACGAAAGACGGUGAU | 362 | AUCACCGUCUUUCGUGGGCCUGG | 151 |
| 152 | GGCCCACGAAAGACGGUGACU | 363 | AGUCACCGUCUUUCGUGGGCCUG | 152 |
| 153 | GCCCACGAAAGACGGUGACUU | 364 | AAGUCACCGUCUUUCGUGGGCCU | 153 |
| 154 | GAAAGACGGUGACUCUUGGCU | 365 | AGCCAAGAGUCACCGUCUUUCGU | 154 |
| 155 | AAAGACGGUGACUCUUGGCUU | 366 | AAGCCAAGAGUCACCGUCUUUCG | 155 |
| 156 | CAAGGAGGGGCCAUCUGGAAA | 367 | UUUCCAGAUGGCCCCUCCUUGGA | 156 |
| 157 | GGCCAUCUGGAAACUUGUGGA | 368 | UCCACAAGUUUCCAGAUGGCCCC | 157 |
| 158 | CCAUCUGGAAACUUGUGGACA | 369 | UGUCCACAAGUUUCCAGAUGGCC | 158 |
| 159 | GGAAACUUGUGGACAGAGAAA | 370 | UUUCUCUGUCCACAAGUUUCCAG | 159 |
| 160 | AAACUUGUGGACAGAGAAGAA | 371 | UUCUUCUCUGUCCACAAGUUUCC | 160 |
| 161 | AACUUGUGGACAGAGAAGAAA | 372 | UUUCUUCUCUGUCCACAAGUUUC | 161 |
| 162 | GUGGACAGAGAAGAAGACCAU | 373 | AUGGUCUUCUUCUCUGUCCACAA | 162 |
| 163 | GAAGACCACGACUGGAGAAGU | 374 | ACUUCUCCAGUCGUGGUCUUCUU | 163 |
| 164 | GCUGCAGGAUAUGCUCAGACU | 375 | AGUCUGAGCAUAUCCUGCAGCCU | 164 |
| 165 | UCAGACUCUAGAGGCGUGGAU | 376 | AUCCACGCCUCUAGAGUCUGAGC | 165 |
| 166 | CAGACUCUAGAGGCGUGGACU | 377 | AGUCCACGCCUCUAGAGUCUGAG | 166 |
| 167 | AGACUCUAGAGGCGUGGACCA | 378 | UGGUCCACGCCUCUAGAGUCUGA | 167 |
| 168 | GACUCUAGAGGCGUGGACCAA | 379 | UUGGUCCACGCCUCUAGAGUCUG | 168 |
| 169 | ACUCUAGAGGCGUGGACCAAA | 380 | UUUGGUCCACGCCUCUAGAGUCU | 169 |
| 170 | ACUCCUUGCUGGCCAGGGAGU | 381 | ACUCCCUGGCCAGCAAGGAGUGA | 170 |
| 171 | GGGAGUUGGGGACUCAGAGGA | 382 | UCCUCUGAGUCCCCAACUCCCUG | 171 |
| 172 | UCAGAGGGACCACUUGGGGCU | 383 | AGCCCCAAGUGGUCCCUCUGAGU | 172 |
| 173 | CACUUGGGGCCAGCCAGACUA | 384 | UAGUCUGGCUGGCCCCAAGUGGU | 173 |
| 174 | UGGCCUCAAUGGCGGACUCAA | 385 | UUGAGUCCGCCAUUGAGGCCAGU | 174 |
| 175 | GGCCUCAAUGGCGGACUCAGU | 386 | ACUGAGUCCGCCAUUGAGGCCAG | 175 |
| 176 | GCCUCAAUGGCGGACUCAGUU | 387 | AACUGAGUCCGCCAUUGAGGCCA | 176 |
| 177 | UCAGUCACAUUGACUGACGGA | 388 | UCCGUCAGUCAAUGUGACUGAGU | 177 |
| 178 | UGACUGACGGGGACCAGGGCU | 389 | AGCCCUGGUCCCCGUCAGUCAAU | 178 |
| 179 | GUGCUGGUGCUGUUGUGUGUA | 390 | UACACACAACAGCACCAGCACCA | 179 |
| 180 | AGCAGGCGCCAAUGGUAUCUA | 391 | UAGAUACCAUUGGCGCCUGCUUG | 180 |
| 181 | UGGUAUCUGGGCGGAGCUCAU | 392 | AUGAGCUCCGCCCAGAUACCAUU | 181 |
| 182 | AAGGAGGGGCCAUCUGGAAAU | 393 | AUUUCCAGAUGGCCCCUCCUUGG | 182 |
| 183 | AGGGGCCAUCUGGAAACUUGU | 394 | ACAAGUUUCCAGAUGGCCCCUCC | 183 |
| 184 | CAUCUGGAAACUUGUGGACAA | 395 | UUGUCCACAAGUUUCCAGAUGGC | 184 |
| 185 | UGGAAACUUGUGGACAGAGAA | 396 | UUCUCUGUCCACAAGUUUCCAGA | 185 |
| 186 | UGGACAGAGAAGAAGACCACA | 397 | UGUGGUCUUCUUCUCUGUCCACA | 186 |
| 187 | GAGAAGAAGACCACGACUGGA | 398 | UCCAGUCGUGGUCUUCUUCUCUG | 187 |
| 188 | AGAAGAAGACCACGACUGGAA | 399 | UUCCAGUCGUGGUCUUCUUCUCU | 188 |
| 189 | ACCACGACUGGAGAAGCCCCU | 400 | AGGGGCUUCUCCAGUCGUGGUCU | 189 |
| 190 | AGGCUGCAGGAUAUGCUCAGA | 401 | UCUGAGCAUAUCCUGCAGCCUCG | 190 |
| 191 | GCUUCACUCCUUGCUGGCCAA | 402 | UUGGCCAGCAAGGAGUGAAGCUC | 191 |
| 192 | CACUCCUUGCUGGCCAGGGAA | 403 | UUCCCUGGCCAGCAAGGAGUGAA | 192 |
| 193 | GCUGGCCAGGGAGUUGGGGAU | 404 | AUCCCCAACUCCCUGGCCAGCAA | 193 |
| 194 | CAGGGAGUUGGGGACUCAGAA | 405 | UUCUGAGUCCCCAACUCCCUGGC | 194 |
| 195 | GUUGGGGACUCAGAGGGACCA | 406 | UGGUCCCUCUGAGUCCCCAACUC | 195 |
| 196 | UGGGGACUCAGAGGGACCACU | 407 | AGUGGUCCCUCUGAGUCCCCAAC | 196 |
| 197 | GGGGACUCAGAGGGACCACUU | 408 | AAGUGGUCCCUCUGAGUCCCCAA | 197 |
| 198 | GGGACUCAGAGGGACCACUUA | 409 | UAAGUGGUCCCUCUGAGUCCCCA | 198 |
| 199 | GCCAGACUGGCCUCAAUGGCA | 410 | UGCCAUUGAGGCCAGUCUGGCUG | 199 |
| 200 | CCAGACUGGCCUCAAUGGCGA | 411 | UCGCCAUUGAGGCCAGUCUGGCU | 200 |
| 201 | AUUGACUGACGGGGACCAGGA | 412 | UCCUGGUCCCCGUCAGUCAAUGU | 201 |
| 202 | ACUGACGGGGACCAGGGCUUA | 413 | UAAGCCCUGGUCCCCGUCAGUCA | 202 |
| 203 | GGUCCCCUGGGGACACAAGCA | 414 | UGCUUGUGUCCCCAGGGGACCUA | 203 |
| 204 | GUCCCCUGGGGACACAAGCAA | 415 | UUGCUUGUGUCCCCAGGGGACCU | 204 |
| 205 | GGUAUCUGGGCGGAGCUCACA | 416 | UGUGAGCUCCGCCCAGAUACCAU | 205 |
| 206 | GUAUCUGGGCGGAGCUCACAA | 417 | UUGUGAGCUCCGCCCAGAUACCA | 206 |
| 207 | UAUCUGGGCGGAGCUCACAGA | 418 | UCUGUGAGCUCCGCCCAGAUACC | 207 |
| 208 | CGGAGCUCACAGAGUUCUUGA | 419 | UCAAGAACUCUGUGAGCUCCGCC | 208 |
| 209 | UUCUUGGAAUAAAAGCAAU | 420 | AUUGCUUUUAUUCCAAGAACU | 209 |
| 210 | AGUUCUUGGAAUAAAAGCAAU | 354 | AUUGCUUUUAUUCCAAGAACUUU | 210 |
| 211 | GUUCUUGGAAUAAAAGCAAU | 421 | AUUGCUUUUAUUCCAAGAACUC | 211 |
| 212 | AGUUCUUGGAAUAAAAGCAAU | 354 | AUUGCUUUUAUUCCAAGAACU | 209 |
| 213 | GUUCUUGGAAUAAAAGCAAU | 421 | AUUGCUUUUAUUCCAAGAACUC | 211 |
| 214 | UUCUUGGAAUAAAAGCAAU | 420 | AUUGCUUUUAUUCCAAGAACU | 209 |
| 215 | GUUCUUGGAAUAAAAGCAAU | 421 | AUUGCUUUUAUUCCAAGAAC | 663 |
| 216 | UUCUUGGAAUAAAAGCAAU | 420 | AUUGCUUUUAUUCCAAGAA | 664 |
| 217 | ACAGAGUUCUUGGAAUAAAAG | 666 | AUUGCUUUUAUUCCAAGAACUCU | 665 |
| | CAAU | | CUGU | |

Specifically, uppercase C, G, U, and A represent the base composition of a nucleotide.

[0140] A portion of the siRNA sequence was chemically modified and conjugated with a linker-targeting ligand moiety. The resulting siRNA conjugates are as follows:

TABLE 2
Sequences of modified siRNA conjugates

| | Strand | | SEQ ID |
|---|---|---|---|
| No. | type | Sequence (5′→3′) | NO |
| Conjugate 1 | SS | mA*mG*mUmUmCmUfUmGfGfAfAmUmAmAmAmAmGmCmAmA | 422 |
| | | mUGalNAc(L96) | |
| | AS | mA*fU*mUmGmCfUmUmUmUmAmUmUmCfCmAfAmGmAmAmC | 423 |
| | | mU*mC*mU | |
| Conjugate 2 | SS | mG*mU*mUmCmUmUfGmGfAfAfUmAmAmAmAmGmCmAmAmC | 424 |
| | | mUGalNAc(L96) | |
| | AS | mA*fG*mUmUmGfCmUmUmUmUmAmUmUfCmCfAmAmGmAmA | 425 |
| | | mC*mU*mC | |
| Conjugate 3 | SS | mU*mC*mUmUmGmGfAmAfUfAfAmAmAmGmCmAmAmCmCmU | 426 |
| | | mUGalNAc(L96) | |
| | AS | mA*fA*mGmGmUfUmGmCmUmUmUmUmAfUmUfCmCmAmAmG | 427 |
| | | mA*mA*mC | |
| Conjugate 4 | SS | mG*mG*mAmAmUmAfAmAfAfGfCmAmAmCmCmUmCmAmGmA | 428 |
| | | mAGalNAc(L96) | |
| | AS | mU*fU*mCmUmGfAmGmGmUmUmGmCmUfUmUfUmAmUmUmC | 429 |
| | | mC*mA*mA | |
| Conjugate 5 | SS | mA*mG*mUmUmCmUfUmGfGfAfAmUmAmAmAmAmGmCmAmA | 422 |
| | | mUGalNAc(L96) | |
| | AS | mA*fU*mUmGmCfUmUfUfUmAmUmUmCfCmAfAmGmAmAmCm | 430 |
| | | U*mC*mU | |
| Conjugate 6 | SS | mG*mU*mUmCmUmUfGmGfAfAfUmAmAmAmAmGmCmAmAmC | 424 |
| | | mUGalNAc(L96) | |
| | AS | mA*fG*mUmUmGfCmUfUfUmUmAmUmUfCmCfAmAmGmAmAm | 431 |
| | | C*mU*mC | |
| Conjugate 7 | SS | mU*mC*mUmUmGmGfAmAfUfAfAmAmAmGmCmAmAmCmCmU | 426 |
| | | mUGalNAc(L96) | |
| | AS | mA*fA*mGmGmUfUmGfCfUmUmUmUmAfUmUfCmCmAmAmGm | 432 |
| | | A*mA*mC | |
| Conjugate 8 | SS | mG*mG*mAmAmUmAfAmAfAfGfCmAmAmCmCmUmCmAmGmA | 428 |
| | | mAGalNAc(L96) | |
| | AS | mU*fU*mCmUmGfAmGfGfUmUmGmCmUfUmUfUmAmUmUmCm | 433 |
| | | C*mA*mA | |
| Conjugate 9 | SS | mG*mA*mAmUmAmAfAmAfGfCfAmAmCmCmUmCmAmGmAmA | 434 |
| | | mUGalNAc(L96) | |
| | AS | mA*fU*mUmCmUfGmAfGfGmUmUmGmCfUmUfUmUmAmUmUm | 435 |
| | | C*mC*mA | |
| Conjugate | SS | mA*mA*mUmAmAmAfAmGfCfAfAmCmCmUmCmAmGmAmAmC | 436 |
| 10 | | mAGalNAc(L96) | |
| | AS | mU*fG*mUmUmCfUmGfAfGmGmUmUmGfCmUfUmUmUmAmUm | 437 |
| | | U*mC*mC | |
| Conjugate | SS | mG*mA*mAmUmAmAfAmAfGfCfAmAmCmCmUmCmAmGmAmA | 434 |
| 11 | | mUGalNAc(L96) | |
| | AS | mA*fU*mUmCmUfGmAmGmGmUmUmGmCfUmUfUmUmAmUmU | 438 |
| | | mC*mC*mA | |
| Conjugate | SS | mA*mA*mUmAmAmAfAmGfCfAfAmCmCmUmCmAmGmAmAmC | 436 |
| 12 | | mAGalNAc(L96) | |
| | AS | mU*fG*mUmUmCfUmGmAmGmGmUmUmGfCmUfUmUmUmAmU | 439 |
| | | mU*mC*mC | |
| Conjugate | SS | mA*mG*mUmUmCmUfUmGfGfAfAmUmAmAmAmAmGmCmAmA | 440 |
| 13 | | mUGalNAc(L96) | |
| | AS | mA*fU*mUmGmCfUmUmUmUfAmUmUmCfCmAfAmGmAmAmCm | 441 |
| | | U*mC*mU | |
| Conjugate | SS | fA*mG*fUmUfCmUfUmGfGfAfAmUfAmAfAmAfGmCfAmAfUGalN | 442 |
| 14 | | Ac(L96) | |
| | AS | mA*fU*mUfGmCfUmUfUmUfAmUmUmCfCmAfAmGfAmAfCmU* | 443 |
| | | mC*mU | |
| Conjugate | SS | mA*mG*mUmUmCmUfUmGfGfAfAmUmAmAmAmAmGmCmAmA | 440 |
| 15 | | mUGalNAc(L96) | |
| | AS | mA*fU*mUmGmCfUmUmUfUmAmUmUmCfCmAfAmGmAmAmCm | 444 |
| | | U*mC*mU | |
| Conjugate | SS | mA*mG*mUmUmCmUmUmGfGfAfAmUmAmAmAmAmGmCmAm | 445 |
| 16 | | AmUGalNAc(L96) | |
| | AS | mA*dT*mUmGdCmUdTmUmUmAmUtnTmCfCmAmAmGmAmAmC | 446 |
| | | mU*mC*mU | |
| Conjugate | SS | mA*mG*mUmUmCmUfUmGfGfAfAmUmAmAmAmAmGmCmAmA | 440 |
| 17 | | mUGalNAc(L96) | |
| | AS | mA*fU*mUmGfCfUmUmUmUmAmUmUmCfCmAfAmGmAmAmCm | 447 |
| | | U*mC*mU | |
| Conjugate | SS | mA*mG*mUmUmCmUfUmGfGfAfAmUmAmAmAmAmGmCmAmA | 440 |
| 18 | | mUGalNAc(L96) | |
| | AS | mA*fU*mUmGfCfUmUfUfUmAmUmUmCfCmAfAmGmAmAmCmU | 448 |
| | | *mC*mU | |
| Conjugate | SS | mA*mG*mUmUmCmUfUmGfGfAfAmUmAmAmAmAmGmCmAmA | 440 |
| 19 | | mUGalNAc(L96) | |
| | AS | eVPmA*fU*mUmGmCfUmUmUmUfAmUmUmCfCmAfAmGmAmA | 449 |
| | | mCmU*mC*mU | |
| Conjugate | SS | fA*mG*fUmUfCmUfUmGfGfAfAmUfAmAfAmAfGmCfAmAfUGalN | 442 |
| 20 | | Ac(L96) | |
| | AS | eVPmA*fU*mUfGmCfUmUfUmUfAmUmUmCfCmAfAmGfAmAfCm | 450 |
| | | U*mC*mU | |
| Conjugate | SS | mA*mG*mUmUmCmUfUmGfGfAfAmUmAmAmAmAmGmCmAmA | 440 |
| 21 | | mUGalNAc(L96) | |
| | AS | eVPmA*fU*mUmGmCfUmUmUfUmAmUmUmCfCmAfAmGmAmA | 451 |
| | | mCmU*mC*mU | |
| Conjugate | SS | mA*mG*mUmUmCmUmUmGfGfAfAmUmAmAmAmAmGmCmAm | 445 |
| 22 | | AmUGalNAc(L96) | |
| | AS | eVPmA*dT*mUmGdCmUdTmUmUmAmUtnTmCfCmAmAmGmAm | 452 |
| | | AmCmU*mC*mU | |
| Conjugate | SS | mA*mG*mUmUmCmUfUmGfGfAfAmUmAmAmAmAmGmCmAmA | 440 |
| 23 | | mUGalNAc(L96) | |
| | AS | eVPmA*fU*mUmGfCfUmUmUmUmAmUmUmCfCmAfAmGmAmA | 453 |
| | | mCmU*mC*mU | |
| Conjugate | SS | mA*mG*mUmUmCmUfUmGfGfAfAmUmAmAmAmAmGmCmAmA | 440 |
| 24 | | mUGalNAc(L96) | |
| | AS | eVPmA*fU*mUmGfCfUmUfUfUmAmUmUmCfCmAfAmGmAmAmC | 454 |
| | | mU*mC*mU | |
| Conjugate | SS | mG*mU*mUmCmUmUmGfGfAfAmUmAmAmAmAmGmCmAmAm | 455 |
| 25 | | U*GalNAc(L96) | |
| | AS | mA*fU*mUmGmCfUmUmUmUmAmUmUmCfCmAfAmGmAmAmC | 456 |
| | | *mU*mC | |
| Conjugate | SS | mG*mU*mUmCmUmUmGfGfAfAmUmAmAmAmAmGmCmAmAm | 455 |
| 26 | | U*GalNAc(L96) | |
| | AS | mA*fU*mUmGmCfUmUmUmUmAmUmUmCfCmAfAmGmAmA*m | 457 |
| | | C*mU | |
| Conjugate | SS | mU*mU*mCmUmUmGfGfAfAmUmAmAmAmAmGmCmAmAmU*G | 458 |
| 27 | | alNAc(L96) | |
| | AS | eVPmA*fU*mUmGmCfUmUmUmUmAmUmUmCfCmAfAmGmAmA | 456 |
| | | mC*mU*mC | |
| Conjugate | SS | mU*mU*mCmUmUmGfGfAfAmUmAmAmAmAmGmCmAmAmU*G | 458 |
| 28 | | alNAc(L96) | |
| | AS | eVPmA*fU*mUmGmCfUmUmUmUmAmUmUmCfCmAfAmGmAmA | 460 |
| | | *mC*mU | |
| Conjugate | SS | mA*mG*mUmUmCmUfUmGfGfAfAmUmAmAmAmAmGmCmAmA | 422 |
| 29 | | mUGalNAc(L96) | |
| | AS | mA*fU*mUfGmCfUmUfUfUmAmUmUmCfCmAfAmGmAmAmCmU | 461 |
| | | *mC*mU | |
| Conjugate | SS | mA*mG*mUmUmCmUfUmGfGfAfAmUmAmAmAmAmGmCmAmA | 422 |
| 30 | | mUGalNAc(L96) | |
| | AS | mA*fU*mUmGmCmUmUmUmUmAmUmUmCfCmAfAmGmAmAm | 462 |
| | | CmU*mC*mU | |
| Conjugate | SS | mA*mG*mUmUmCmUfUmGfGfAfAmUmAmAmAmAmGmCmAmA | 422 |
| 31 | | mUGalNAc(L96) | |
| | AS | mA*fU*mUfGmCfUmUmUmUmAmUmUmCfCmAfAmGmAmAmCm | 463 |
| | | U*mC*mU | |
| Conjugate | SS | mA*mG*mUmUmCmUmUmGfGfAfAmUmAmAmAmAmGmCmAm | 464 |
| 32 | | AmUGalNAc(L96) | |
| | AS | mA*fU*mUmGmCfUmUmUmUmAmUmUmCfCmAfAmGmAmAmC | 423 |
| | | mU*mC*mU | |
| Conjugate | SS | mA*mG*mUmUmCmUmUmGfGfAfAmUmAmAmAmAmGmCmAm | 464 |
| 33 | | AmUGalNAc(L96) | |
| | AS | mA*fU*mUmGmCmUmUmUmUmAmUmUmCfCmAfAmGmAmAm | 462 |
| | | CmU*mC*mU | |
| Conjugate | SS | mA*mG*mUmUmCmUmUmGfGfAfAmUmAmAmAmAmGmCmAm | 464 |
| 34 | | AmUGalNAc(L96) | |
| | AS | mA*fU*mUfGmCfUmUmUmUmAmUmUmCfCmAfAmGmAmAmCm | 463 |
| | | U*mC*mU | |
| Conjugate | SS | mG*mU*mUmCmUmUmGfGfAfAmUmAmAmAmAmGmCmAmAm | 465 |
| 35 | | UGalNAc(L96) | |
| | AS | mA*fU*mUmGmCmUmUmUmUmAmUmUmCfCmAfAmGmAmAm | 466 |
| | | C*mU*mC | |
| Conjugate | SS | mG*mU*mUmCmUmUmGfGfAfAmUmAmAmAmAmGmCmAmAm | 465 |
| 36 | | UGalNAc(L96) | |
| | AS | mA*fU*mUfGmCfUmUmUmUmAmUmUmCfCmAfAmGmAmAmC* | 467 |
| | | mU*mC | |
| Conjugate | SS | mG*mA*mAmUmAmAfAmAfGfCfAmAmCmCmUmCmAmGmAmA | 468 |
| 37 | | mAGalNAc(L96) | |
| | AS | mU*fU*mUmCmUfGmAfGfGmUmUmGmCfUmUfUmUmAmUmUm | 469 |
| | | C*mC*mA | |
| Conjugate | SS | mG*mA*mAmCmAmAfAmAfGfCfAmAmCmCmUmCmAmGmAmA | 470 |
| 38 | | mAGalNAc(L96) | |
| | AS | mU*fU*mUmCmUfGmAfGfGmUmUmGmCfUmUfUmUmGmUmUm | 471 |
| | | C*mU*mU | |
| Conjugate | SS | mG*mA*mAmCmAfAmAfAfGfCmAmAmCmCmUmCmAmGmAmA | 472 |
| 39 | | GalNAc(L96) | |
| | AS | mU*fU*mCmUmGfAmGfGfUmUmGmCmUfUmUfUmGmUmUmC* | 473 |
| | | mU*mU | |
| Conjugate | SS | mG*mA*mAmCmAmAfAmAfGfCfAmAmCmCmUmCmAmGmAmA | 470 |
| 40 | | mAGalNAc(L96) | |
| | AS | mU*fU*mUmCmUfGmAmGmGmUmUmGmCfUmUfUmUmGmUmU | 474 |
| | | mC*mU*mU | |
| Conjugate | SS | mG*mA*mAmCmAfAmAfAfGfCmAmAmCmCmUmCmAmGmAmA | 472 |
| 41 | | GalNAc(L96) | |
| | AS | mU*fU*mCmUmGfAmGmGmUmUmGmCmUfUmUfUmGmUmUmC | 475 |
| | | *mU*mU | |
| Conjugate | SS | mG*mA*mAmUmAmAmAmAfGfCfAmAmCmCmUmCmAmGmAm | 476 |
| 42 | | AmAGalNAc(L96) | |
| | AS | mU*fU*mUmCmUfGmAmGmGmUmUmGmCfUmUfUmUmAmUmU | 477 |
| | | mC*mC*mA | |
| Conjugate | SS | mG*mA*mAmCmAmAmAmAfGfCfAmAmCmCmUmCmAmGmAmA | 478 |
| 43 | | mAGalNAc(L96) | |
| | AS | mU*fU*mUmCmUfGmAmGmGmUmUmGmCfUmUfUmUmGmUmU | 474 |
| | | mC*mU*mU | |
| Conjugate | SS | mG*mA*mAmCmGmAmAmAfGfUfAmAmCmCmUmCmAmGmAm | 479 |
| 44 | | AmAGalNAc(L96) | |
| | AS | mU*fU*mUmCmUfGmAmGmGmUmUmGmCfUmUfUmCmGmUmU | 480 |
| | | mC*mU*mU | |
| Conjugate | SS | mG*mA*mAmCmAmGmAmAfGfUfAmAmCmCmUmCmAmGmAm | 481 |
| 45 | | AmAGalNAc(L96) | |
| | AS | mU*fU*mUmCmUfGmAmGmGmUmUmGmCfUmUfCmUmGmUmU | 482 |
| | | mC*mU*mU | |
| Conjugate | SS | mG*mA*mAmUmAmAmAfAfGfCmAmAmCmCmUmCmAmGmAm | 483 |
| 46 | | AGalNAc(L96) | |
| | AS | mU*fU*mCmUmGfAmGmGmUmUmGmCmUfUmUfUmAmUmUmC | 484 |
| | | *mU*mU | |
| Conjugate | SS | mC*mA*mAmAfAmGfCfAfAmCmCmUmCmAmGmAmAmCmAGal | 485 |
| 47 | | NAc(L96) | |
| | AS | mU*fG*mUmUmCfUmGfAfGmGmUmUmGfCmUfUmUmUmG*mU* | 486 |
| | | mU | |
| Conjugate | SS | mC*mA*mAmAfAmGfCfAfAmCmCmUmCmAmGmAmAmCmAGal | 485 |
| 48 | | NAc(L96) | |
| | AS | mU*fG*mUmUmCfUmGmAmGmGmUmUmGfCmUfUmUmUmG*m | 487 |
| | | U*mU | |
| Conjugate | SS | mC*mA*mAmGfAmGfCfAfAmCmCmUmCmAmGmAmAmCmAGal | 488 |
| 49 | | NAc(L96) | |
| | AS | mU*fG*mUmUmCfUmGmAmGmGmUmUmGfCmUfCmUmUmG*m | 489 |
| | | U*mU | |
| Conjugate | SS | mC*mA*mAmAmAmGfCfAfAmCmCmUmCmAmGmAmAmCmAGal | 490 |
| 50 | | NAc(L96) | |
| | AS | mU*fG*mUmUmCfUmGmAmGmGmUmUmGfCmUfUmUmUmG*m | 487 |
| | | U*mU | |
| Conjugate | SS | mC*mA*mAmAmAmGfCfAfAmUmCmUmCmAmGmAmAmCmAGal | 491 |
| 51 | | NAc(L96) | |
| | AS | mU*fG*mUmUmCfUmGmAmGmGmUmUmGfCmUfUmUmUmG*m | 487 |
| | | U*mU | |
| Conjugate | SS | mC*mA*mAmGmAmGfCfAfAmCmCmUmCmAmGmAmAmCmAGal | 492 |
| 52 | | NAc(L96) | |
| | AS | mU*fG*mUmUmCfUmGmAmGmGmUmUmGfCmUfCmUmUmG*m | 489 |
| | | U*mU | |
| Conjugate | SS | mA*mG*mUmUmCmUfUmGfGfAfAmUmAmAmAmAmGmCmAmA | 493 |
| 53 | | mAGalNAc(L96) | |
| | AS | mU*fU*mUmGmCfUmUmUmUmAmUmUmCfCmAfAmGmAmAmC | 494 |
| | | mU*mC*mU | |
| Conjugate | SS | mA*mG*mUmUmCmUfUmGfGfAfAmUmAmAmAmAmGmCmAmA | 493 |
| 54 | | mAGalNAc(L96) | |
| | AS | mU*fU*mUmGmCfUmUfUfUmAmUmUmCfCmAfAmGmAmAmCm | 495 |
| | | U*mC*mU | |
| Conjugate | SS | mA*mG*mUmUmCmUmUmGfGfAfAmUmAmAmAmAmGmCmAm | 496 |
| 55 | | AmAGalNAc(L96) | |
| | AS | mU*fU*mUmGmCfUmUmUmUmAmUmUmCfCmAfAmGmAmAmC | 494 |
| | | mU*mC*mU | |
| Conjugate | SS | mA*mG*mUmUmCdTfUmGfGfAfAmUmAmAmAmAmGmCmAmA | 497 |
| 56 | | mUGalNAc(L96) | |
| | AS | mA*fU*mUmGmCfUmUmUmUmAmUmUmCfCmAfAmGmAmAmC | 423 |
| | | mU*mC*mU | |
| Conjugate | SS | mA*mG*mUmUmCdTfUmGfGfAfAmUmAmAmAmAmGmCmAmA | 497 |
| 57 | | mUGalNAc(L96) | |
| | AS | mA*fU*mUmGmCfUmUfUfUmAmUmUmCfCmAfAmGmAmAmCm | 430 |
| | | U*mC*mU | |
| Conjugate | SS | mA*mG*mUmUmCdTmUmGfGfAfAmUmAmAmAmAmGmCmAmA | 498 |
| 58 | | mUGalNAc(L96) | |
| | AS | mA*fU*mUmGmCfUmUmUmUmAmUmUmCfCmAfAmGmAmAmC | 423 |
| | | mU*mC*mU | |
| Conjugate | SS | mG*mG*mUmUmCmUfUmGfGfAfAmUmAmAmAmAmGmCmAmA | 499 |
| 59 | | mUGalNAc(L96) | |
| | AS | mA*fU*mUmGmCfUmUmUmUmAmUmUmCfCmAfAmGmAmAmC | 423 |
| | | mU*mC*mU | |
| Conjugate | SS | mG*mG*mUmUmCmUfUmGfGfAfAmUmAmAmAmAmGmCmAmA | 499 |
| 60 | | mUGalNAc(L96) | |
| | AS | mA*fU*mUmGmCfUmUfUfUmAmUmUmCfCmAfAmGmAmAmCm | 430 |
| | | U*mC*mU | |
| Conjugate | SS | mG*mG*mUmUmCmUmUmGfGfAfAmUmAmAmAmAmGmCmAm | 500 |
| 61 | | AmUGalNAc(L96) | |
| | AS | mA*fU*mUmGmCfUmUmUmUmAmUmUmCfCmAfAmGmAmAmC | 423 |
| | | mU*mC*mU | |
| Conjugate | SS | tnA*mG*mUmUmCmUfUmGfGfAfAmUmAmAmAmAmGmCmAmA | 501 |
| 62 | | mUGalNAc(L96) | |
| | AS | mA*fU*mUmGmCfUmUmUmUmAmUmUmCfCmAfAmGmAmAmC | 423 |
| | | mU*mC*mU | |
| Conjugate | SS | tnA*mG*mUmUmCmUfUmGfGfAfAmUmAmAmAmAmGmCmAmA | 501 |
| 63 | | mUGalNAc(L96) | |
| | AS | mA*fU*mUmGmCfUmUfUfUmAmUmUmCfCmAfAmGmAmAmCm | 430 |
| | | U*mC*mU | |
| Conjugate | SS | tnA*mG*mUmUmCmUmUmGfGfAfAmUmAmAmAmAmGmCmAm | 502 |
| 64 | | AmUGalNAc(L96) | |
| | AS | mA*fU*mUmGmCfUmUmUmUmAmUmUmCfCmAfAmGmAmAmC | 423 |
| | | mU*mC*mU | |
| Conjugate | SS | mA*mG*mUmUmCmUfUmGfGfAfAmUmAmAmAmAmGmCmAmA | 422 |
| 65 | | mUGalNAc(L96) | |
| | AS | mA*fU*mUmGmCfUmUmUmUmAmUmUmCfCmAfAmGmAmAmC | 503 |
| | | mU*tnC*mU | |
| Conjugate | SS | mA*mG*mUmUmCmUfUmGfGfAfAmUmAmAmAmAmGmCmAmA | 422 |
| 66 | | mUGalNAc(L96) | |
| | AS | mA*fU*mUmGmCfUmUfUfUmAmUmUmCfCmAfAmGmAmAmCm | 504 |
| | | U*tnC*mU | |
| Conjugate | SS | mA*mG*mUmUmCmUmUmGfGfAfAmUmAmAmAmAmGmCmAm | 464 |
| 67 | | AmUGalNAc(L96) | |
| | AS | mA*fU*mUmGmCfUmUmUmUmAmUmUmCfCmAfAmGmAmAmC | 503 |
| | | mU*tnC*mU | |
| Conjugate | SS | mA*mG*mUmUmCmUfUmGfGfAfAmUmAmAmAmAmGmCmAmA | 422 |
| 68 | | mUGalNAc(L96) | |
| | AS | mA*fU*mUmGmCfUmUmUmUmAmUmUmCfCmAfAmGmAmAmC | 505 |
| | | mU*ml*mU | |
| Conjugate | SS | mA*mG*mUmUmCmUfUmGfGfAfAmUmAmAmAmAmGmCmAmA | 422 |
| 69 | | mUGalNAc(L96) | |
| | AS | mA*fU*mUmGmCfUmUfUfUmAmUmUmCfCmAfAmGmAmAmCm | 506 |
| | | U*ml*mU | |
| Conjugate | SS | mA*mG*mUmUmCmUmUmGfGfAfAmUmAmAmAmAmGmCmAm | 464 |
| 70 | | AmUGalNAc(L96) | |
| | AS | mA*fU*mUmGmCfUmUmUmUmAmUmUmCfCmAfAmGmAmAmC | 505 |
| | | mU*ml*mU | |
| Conjugate | SS | mG*mU*mUmCmUfUmGfGfAfAmUmAmAmAmAmGmCmAmAmA | 507 |
| 71 | | *GalNAc(L96) | |
| | AS | mU*fU*mUmGmCfUmUmUmUmAmUmUmCfCmAfAmGmAmAmC | 508 |
| | | *mU*mC | |
| Conjugate | SS | mG*mU*mUmCmUfUmGfGfAfAmUmAmAmAmAmGmCmAmAmA | 507 |
| 72 | | *GalNAc(L96) | |
| | AS | mU*fU*mUmGmCfUmUfUfUmAmUmUmCfCmAfAmGmAmAmC*m | 509 |
| | | U*mC | |
| Conjugate | SS | mG*mU*mUmCmUmUmGfGfAfAmUmAmAmAmAmGmCmAmAm | 510 |
| 73 | | A*GalNAc(L96) | |
| | AS | mU*fU*mUmGmCfUmUmUmUmAmUmUmCfCmAfAmGmAmAmC | 508 |
| | | *mU*mC | |
| Conjugate | SS | mG*mU*mUmCdTfUmGfGfAfAmUmAmAmAmAmGmCmAmAmU* | 511 |
| 74 | | GalNAc(L96) | |
| | AS | mA*fU*mUmGmCfUmUmUmUmAmUmUmCfCmAfAmGmAmAmC | 456 |
| | | *mU*mC | |
| Conjugate | SS | mG*mU*mUmCdTfUmGfGfAfAmUmAmAmAmAmGmCmAmAmU* | 511 |
| 75 | | GalNAc(L96) | |
| | AS | mA*fU*mUmGmCfUmUfUfUmAmUmUmCfCmAfAmGmAmAmC*m | 512 |
| | | U*mC | |
| Conjugate | SS | mG*mU*mUmCdTmUmGfGfAfAmUmAmAmAmAmGmCmAmAmU | 513 |
| 76 | | *GalNAc(L96) | |
| | AS | mA*fU*mUmGmCfUmUmUmUmAmUmUmCfCmAfAmGmAmAmC | 456 |
| | | *mU*mC | |
| Conjugate | SS | tnG*mU*mUmCmUfUmGfGfAfAmUmAmAmAmAmGmCmAmAmU | 514 |
| 77 | | *GalNAc(L96) | |
| | AS | mA*fU*mUmGmCfUmUmUmUmAmUmUmCfCmAfAmGmAmAmC | 456 |
| | | *mU*mC | |
| Conjugate | SS | tnG*mU*mUmCmUfUmGfGfAfAmUmAmAmAmAmGmCmAmAmU | 514 |
| 78 | | *GalNAc(L96) | |
| | AS | mA*fU*mUmGmCfUmUfUfUmAmUmUmCfCmAfAmGmAmAmC*m | 456 |
| | | U*mC | |
| Conjugate | SS | tnG*mU*mUmCmUmUmGfGfAfAmUmAmAmAmAmGmCmAmAm | 515 |
| 79 | | U*GalNAc(L96) | |
| | AS | mA*fU*mUmGmCfUmUmUmUmAmUmUmCfCmAfAmGmAmAmC | 456 |
| | | *mU*mC | |
| Conjugate | SS | mG*mU*mUmCmUfUmGfGfAfAmUmAmAmAmAmGmCmAmAmU | 516 |
| 80 | | *GalNAc(L96) | |
| | AS | mA*fU*mUmGmCfUmUmUmUmAmUmUmCfCmAfAmGmAmAmC | 517 |
| | | *tnU*mC | |
| Conjugate | SS | mG*mU*mUmCmUfUmGfGfAfAmUmAmAmAmAmGmCmAmAmU | 516 |
| 81 | | *GalNAc(L96) | |
| | AS | mA*fU*mUmGmCfUmUfUfUmAmUmUmCfCmAfAmGmAmAmC*tn | 518 |
| | | U*mC | |
| Conjugate | SS | mG*mU*mUmCmUmUmGfGfAfAmUmAmAmAmAmGmCmAmAm | 519 |
| 82 | | U*GalNAc(L96) | |
| | AS | mA*fU*mUmGmCfUmUmUmUmAmUmUmCfCmAfAmGmAmAmC | 517 |
| | | *tnU*mC | |
| Conjugate | SS | mG*mU*mUmCmUfUmGfGfAfAmUmAmAmAmAmGmCmAmAmU | 516 |
| 83 | | *GalNAc(L96) | |
| | AS | mA*fU*mUmGmCfUmUmUmUmAmUmUmCfCmAfAmGmAmAmC | 520 |
| | | *mI*mC | |
| Conjugate | SS | mG*mU*mUmCmUfUmGfGfAfAmUmAmAmAmAmGmCmAmAmU | 516 |
| 84 | | *GalNAc(L96) | |
| | AS | mA*fU*mUmGmCfUmUfUfUmAmUmUmCfCmAfAmGmAmAmC*m | 521 |
| | | I*mC | |
| Conjugate | SS | mG*mU*mUmCmUmUmGfGfAfAmUmAmAmAmAmGmCmAmAm | 519 |
| 85 | | U*GalNAc(L96) | |
| | AS | mA*fU*mUmGmCfUmUmUmUmAmUmUmCfCmAfAmGmAmAmC | 520 |
| | | *mI*mC | |
| Conjugate | SS | mG*mU*mUmCmUfUmGfGfAfAmUmAmAmAmAmGmCmAmAmU | 516 |
| 86 | | *GalNAc(L96) | |
| | AS | mA*fU*mUmGmCmUmUmUmUmAmUmUmCfCmAfAmGmAmAm | 466 |
| | | C*mU*mC | |
| Conjugate | SS | mG*mU*mUmCmUfUmGfGfAfAmUmAmAmAmAmGmCmAmAmU | 516 |
| 87 | | *GalNAc(L96) | |
| | AS | mA*fU*mUmGmCmUmUfUfUmAmUmUmCfCmAfAmGmAmAmC* | 522 |
| | | mU*mC | |
| Conjugate | SS | mG*mU*mUmCmUmUmGfGfAfAmUmAmAmAmAmGmCmAmAm | 519 |
| 88 | | U*GalNAc(L96) | |
| | AS | mA*fU*mUmGmCmUmUmUmUmAmUmUmCfCmAfAmGmAmAm | 466 |
| | | C*mU*mC | |
| Conjugate | SS | mU*mU*mCmUmUmGfGfAfAmUmAmAmAmAmGmCmAmAmU*G | 523 |
| 89 | | alNAc(L96) | |
| | AS | mA*fU*mUmGmCfUmUmUmUmAmUmUmGfCmAfAmGmAmA*m | 524 |
| | | C*mU | |
| Conjugate | SS | mG*mU*mUmCmUfUmGfGfAfAmUmAmAmAmAmGmCmAmAmU | 516 |
| 90 | | *GalNAc(L96) | |
| | AS | mA*fU*mUmGmCfUmUmUmUmAmUmUmCfCmAfAmGmAmAmC | 456 |
| | | *mU*mC | |
| Conjugate | SS | mG*mU*mUmCmUfUmGfGfAfAmUmAmAmAmAmGmCmAmAmU | 516 |
| 91 | | *GalNAc(L96) | |
| | AS | mA*fU*mUmGmCfUmUfUfUmAmUmUmCfCmAfAmGmAmAmC*m | 512 |
| | | U*mC | |
| Conjugate | SS | mA*mG*mUmUmCmUmUmGfGfAfAmUmAmAmAmAmGmCmAm | 464 |
| 92 | | AmUGalNAc(L96) | |
| | AS | eVPmA*fU*mUmGmCfUmUmUmUmAmUmUmCfCmAfAmGmAmA | 525 |
| | | mCmU*mC*mU | |
| Conjugate | SS | mA*mG*mUmUmCmUfUmGfGfAfAmUmAmAmAmAmGmCmAmA | 422 |
| 93 | | mUGalNAc(L96) | |
| | AS | eVPmA*fU*mUmGmCfUmUmUmUmAmUmUmCfCmAfAmGmAmA | 525 |
| | | mCmU*mC*mU | |
| Conjugate | SS | mA*mG*mUmUmCmUfUmGfGfAfAmUmAmAmAmAmGmCmAmA | 422 |
| 94 | | mUGalNAc(L96) | |
| | AS | eVPmA*fU*mUmGmCfUmUfUfUmAmUmUmCfCmAfAmGmAmAm | 526 |
| | | CmU*mC*mU | |
| Conjugate | SS | mA*mA*mUmAmAmAmAmGfCfAfAmCmCmUmCmAmGmAmAmC | 527 |
| 95 | | mAGalNAc(L96) | |
| | AS | mU*fG*mUmUmCfUmGmGmGmGmUmUmGfCmUfUmUmUmAmU | 528 |
| | | mU*mC*mC | |
| Conjugate | SS | mA*mG*mUmUmCmUfUmGfGfAfAmUmAmAmAmAmGmCmAmA | 422 |
| 96 | | mUGalNAc(L96) | |
| | AS | eVPmA*fU*mUmGmCfUmUfUfUfAmUmUmCfCmAfAmGmAmAmC | 529 |
| | | mU*mC*mU | |
| Conjugate | SS | mA*mG*mUmUmCmUfUmGfGfAfAmUmAmAfAmAmGmCmA*mA | 530 |
| 97 | | *mUGalNAc(L96) | |
| | AS | eVPmA*fU*mUmGmCfUmUfUfUfAmUmUmCfCmAfAmGmAmAmC | 529 |
| | | mU*mC*mU | |
| Conjugate | SS | mA*mG*mUmUmCmUfUmGfGfAfAmUmAmAmAmAmGmCmAmA | 422 |
| 98 | | mUGalNAc(L96) | |
| | AS | mA*fU*mUmGmCfUmUfUfUfAmUmUmCfCmAfAmGmAmAmCmU | 531 |
| | | *mC*mU | |
| Conjugate | SS | mA*mG*mUmUmCmUfUmGfGfAfAmUmAmAfAmAmGmCmA*mA | 530 |
| 99 | | *mUGalNAc(L96) | |
| | AS | mA*fU*mUmGmCfUmUfUfUfAmUmUmCfCmAfAmGmAmAmCmU | 531 |
| | | *mC*mU | |
| Conjugate | SS | mA*mG*mUmUmCmUfUmGfGmAfAmUfAmAfAmAmGmCmAmA | 532 |
| 100 | | mUGalNAc(L96) | |
| | AS | mA*fU*fUfGmCfUmUfUmUfAmUfUmCfCmAfAmGfAmAfCmU*mC | 533 |
| | | *mU | |
| Conjugate | SS | tnA*mG*mUmUmCmUfUmGfGfAfAmUmAmAmAmAmGmCmAmA | 501 |
| 101 | | mUGalNAc(L96) | |
| | AS | mA*fU*mUmGmCfUmUmUmUmAmUmUmCfCmAfAmGmAmAmCt | 534 |
| | | nU*mC*mU | |
| Conjugate | SS | tnA*mG*mUmUmCmUfUmGfGfAfAmUmAmAmAmAmGmCmAmA | 501 |
| 102 | | mUGalNAc(L96) | |
| | AS | mA*fU*mUmGmCfUmUmUmUmAmUmUmCfCmAfAmGmAmAmCt | 535 |
| | | nU*tnC*mU | |
| Conjugate | SS | tnA*mG*mUmUmCmUfUmGfGfAfAmUmAmAmAmAmGmCmAmA | 501 |
| 103 | | mUGalNAc(L96) | |
| | AS | mA*fU*mUmGmCfUmUmUmUmAmUmUmCfCmAfAmGmAmAmCt | 536 |
| | | nU*mC*tnU | |
| Conjugate | SS | tnA*mG*mUmUmCmUfUmGfGfAfAmUmAmAmAmAmGmCmAmA | 501 |
| 104 | | mUGalNAc(L96) | |
| | AS | mA*fU*mUmGmCfUmUmUmUmAmUmUmCfCmAfAmGmAmAmCt | 537 |
| | | nU*tnC*tnU | |
| Conjugate | SS | mC*mA*mAmAfAmGfCfAfAmCmCmUmCmAmGmAmAmCmUGal | 538 |
| 105 | | NAc(L96) | |
| | AS | mA*fG*mUmUmCfUmGfAfGmGmUmUmGfCmUfUmUmUmG*mU* | 539 |
| | | mU | |
| Conjugate | SS | mC*mA*mAmAfAmGfCfAfAmCmCmUmCmAmGmAmAmCmUGal | 538 |
| 106 | | NAc(L96) | |
| | AS | mA*fG*mUmUmCfUmGmAmGmGmUmUmGfCmUfUmUmUmG*m | 540 |
| | | U*mU | |
| Conjugate | SS | mCmAmAmAmAmGfCfAfAmUmCmUmCmAmGmAmAmCmUGalN | 541 |
| 107 | | Ac(L96) | |
| | AS | mA*fG*mUmUmCfUmGmAmGmGmUmUmGfCmUfUmUmUmG*m | 540 |
| | | U*mU | |
| Conjugate | SS | mC*mA*mAmAmAmGfCfAfAmCmCmUmCmAmGmAmAmCmAGal | 490 |
| 108 | | NAc(L96) | |
| | AS | mU*dG*mUmUdCmUdGmAmGmGmUtnUmGfCmUmUmUmUmG*m | 542 |
| | | U*mU | |
| Conjugate | SS | mC*mA*mAmAmAmGfCfAfAmCmCmUmCmAmGmAmAmCmUGal | 543 |
| 109 | | NAc(L96) | |
| | AS | mA*dG*mUmUdCmUdGmAmGmGmUtnUmGfCmUmUmUmUmG*m | 544 |
| | | U*mU | |
| Conjugate | SS | mC*mA*mAmAmAmGfCfAfAmUmCmUmCmAmGmAmAmCmAGal | 491 |
| 110 | | NAc(L96) | |
| | AS | mU*dG*mUmUdCmUdGmAmGmGmUtnUmGfCmUmUmUmUmG*m | 542 |
| | | U*mU | |
| Conjugate | SS | mC*mA*mAmAmAmGfCfAfAmUmCmUmCmAmGmAmAmCmUGal | 545 |
| 111 | | NAc(L96) | |
| | AS | mA*dG*mUmUdCmUdGmAmGmGmUtnUmGfCmUmUmUmUmG*m | 544 |
| | | U*mU | |
| Conjugate | SS | mG*mA*mAmCmAmAfAmAfGfCfAmAmCmCmUmCmAmGmAmA | 546 |
| 112 | | mUGalNAc(L96) | |
| | AS | mA*fU*mUmCmUfGmAfGfGmUmUmGmCfUmUfUmUmGmUmUm | 547 |
| | | C*mU*mU | |
| Conjugate | SS | mG*mA*mAmCmAmAfAmAfGfCfAmAmCmCmUmCmAmGmAmA | 546 |
| 113 | | mUGalNAc(L96) | |
| | AS | mA*fU*mUmCmUfGmAmGmGmUmUmGmCfUmUfUmUmGmUmU | 548 |
| | | mC*mU*mU | |
| Conjugate | SS | mG*mA*mAmCmGmAmAmAfGfUfAmAmCmCmUmCmAmGmAm | 549 |
| 114 | | AmUGalNAc(L96) | |
| | AS | mA*fU*mUmCmUfGmAmGmGmUmUmGmCfUmUfUmCmGmUmU | 550 |
| | | mC*mU*mU | |
| Conjugate | SS | mA*mG*mUmUmCmUfUmGfGfAfAmUmAmAmAmAmGmCmAmA | 422 |
| 115 | | mUGalNAc(L96) | |
| | AS | eVPmA*fU*mUmGgnCfUmUmUmUfAmUmUmCfCmAfAmGmAmA | 551 |
| | | mCmU*mC*mU | |
| Conjugate | SS | mA*mG*mUmUmCmUfUmGfGfAfAmUmAmAmAmAmGmCmAmA | 422 |
| 116 | | mUGalNAc(L96) | |
| | AS | eVPmA*fU*mUmGmCgnTmUmUmUfAmUmUmCfCmAfAmGmAmA | 552 |
| | | mCmU*mC*mU | |
| Conjugate | SS | mA*mG*mUmUmCmUfUmGfGfAfAmUmAmAmAmAmGmCmAmA | 422 |
| 117 | | mUGalNAc(L96) | |
| | AS | eVPmA*fU*mUmGmCfUgnTmUmUfAmUmUmCfCmAfAmGmAmA | 553 |
| | | mCmU*mC*mU | |
| Conjugate | SS | mA*mG*mUmUmCmUfUmGfGfAfAmUmAmAmAmAmGmCmAmA | 422 |
| 118 | | mUGalNAc(L96) | |
| | AS | eVPmA*fU*mUmGmCfUmUgnTmUfAmUmUmCfCmAfAmGmAmA | 554 |
| | | mCmU*mC*mU | |
| Conjugate | SS | mA*mG*mUmUmCmUfUmGfGfAfAmUmAmAmAmAmGmCmAmA | 422 |
| 119 | | mUGalNAc(L96) | |
| | AS | eVPmA*fU*mUmGmIfUmUmUmUfAmUmUmCfCmAfAmGmAmAm | 555 |
| | | CmU*mC*mU | |
| Conjugate | SS | mA*mG*mUmUmCmUfUmGfGfAfAmUmAmAmAmAmGmCmAmA | 422 |
| 120 | | mUGalNAc(L96) | |
| | AS | eVPmA*fU*mUmGmCmImUmUmUfAmUmUmCfCmAfAmGmAmA | 556 |
| | | mCmU*mC*mU | |
| Conjugate | SS | mA*mG*mUmUmCmUfUmGfGfAfAmUmAmAmAmAmGmCmAmA | 422 |
| 121 | | mUGalNAc(L96) | |
| | AS | eVPmA*fU*mUmGmCfUmImUmUfAmUmUmCfCmAfAmGmAmAm | 557 |
| | | CmU*mC*mU | |
| Conjugate | SS | mA*mG*mUmUmCmUfUmGfGfAfAmUmAmAmAmAmGmCmAmA | 422 |
| 122 | | mUGalNAc(L96) | |
| | AS | eVPmA*fU*mUmGmCfUmUmImUfAmUmUmCfCmAfAmGmAmAm | 558 |
| | | CmU*mC*mU | |
| Conjugate | SS | mCmAmAmAmAmGfCfAfAmUmCmUmCmAmGmAmAmCmAGalN | 559 |
| 123 | | Ac(L96) | |
| | AS | eVPmU*fG*mUmUgnCfUmGmAmGmGmUmUmGfCmUfUmUmUm | 560 |
| | | G*mU*mU | |
| Conjugate | SS | mCmAmAmAmAmGfCfAfAmUmCmUmCmAmGmAmAmCmAGalN | 559 |
| 124 | | Ac(L96) | |
| | AS | e VPmU*fG*mUmUmCgnTmGmAmGmGmUmUmGfCmUfUmUmUm | 561 |
| | | G*mU*mU | |
| Conjugate | SS | mCmAmAmAmAmGfCfAfAmUmCmUmCmAmGmAmAmCmAGalN | 559 |
| 125 | | Ac(L96) | |
| | AS | eVPmU*fG*mUmUmCfUgnGmAmGmGmUmUmGfCmUfUmUmUm | 562 |
| | | G*mU*mU | |
| Conjugate | SS | mCmAmAmAmAmGfCfAfAmUmCmUmCmAmGmAmAmCmAGalN | 559 |
| 126 | | Ac(L96) | |
| | AS | eVPmU*fG*mUmUmCfUmGgnAmGmGmUmUmGfCmUfUmUmUm | 563 |
| | | G*mU*mU | |
| Conjugate | SS | mCmAmAmAmAmGfCfAfAmUmCmUmCmAmGmAmAmCmAGalN | 559 |
| 127 | | Ac(L96) | |
| | AS | eVPmU*fG*mUmUmCmImGmAmGmGmUmUmGfCmUfUmUmUmG | 564 |
| | | *mU*mU | |
| Conjugate | SS | mCmAmAmAmAmGfCfAfAmUmCmUmCmAmGmAmAmCmAGalN | 559 |
| 128 | | Ac(L96) | |
| | AS | eVPmU*fG*mUmUmCfUmImAmGmGmUmUmGfCmUfUmUmUmG | 565 |
| | | *mU*mU | |
| Conjugate | SS | mCmAmAmAmAmGfCfAfAmUmCmUmCmAmGmAmAmCmAGalN | 559 |
| 129 | | Ac(L96) | |
| | AS | eVPmU*fG*mUmUmCfUmGmImGmGmUmUmGfCmUfUmUmUmG | 566 |
| | | *mU*mU | |
| Conjugate | SS | mA*mG*mUmUmCmUfUmGfGfAfAmUmAmAmAmAmGmCmAmA | 422 |
| 130 | | mUGalNAc(L96) | |
| | AS | eVPmA*fU*mUmGmCfUmUmUmUmAmUmUmCfCmAfAmGmAmA | 567 |
| | | mCmU*mU*mU | |
| Conjugate | SS | mA*mG*mUmUmCmUfUmGfGfAfAmUmAmAmAmAmGmCmAmA | 422 |
| 131 | | mUGalNAc(L96) | |
| | AS | eVPmA*fU*mUmGmCfUmUfUfUmAmUmUmCfCmAfAmGmAmAm | 568 |
| | | CmU*mU*mU | |
| Conjugate | SS | mA*mG*mUmUmCmUfUmGfGfAfAmUmAmAmAmAmGmCmAmA | 422 |
| 132 | | mUGalNAc(L96) | |
| | AS | eVPmA*fU*mUmGfCfUmUmUmUmAmUmUmCfCmAfAmGmAmA | 569 |
| | | mCmU*mU*mU | |
| Conjugate | SS | mA*mG*mUmUmCmUfUmGfGfAfAmUmAmAmAmAmGmCmAmA | 422 |
| 133 | | mUGalNAc(L96) | |
| | AS | eVPmA*fU*mUmGmCfUmUmUmUfAmUmUmCfCmAfAmGmAmA | 570 |
| | | mCmU*mU*mU | |
| Conjugate | SS | mCmAmAmAmAmGfCfAfAmUmCmUmCmAmGmAmAmCmAGalN | 559 |
| 134 | | Ac(L96) | |
| | AS | eVPmU*fG*mUmUmCfUmGmAmGmGmUmUmGfCmUfUmUmUmG | 571 |
| | | *mU*mU | |
| Conjugate | SS | mA*mG*mAmGmUmUfCfUfUmGmGmAmAmUmAmAmAmAmA*G | 572 |
| 135 | | alNAc(L96) | |
| | AS | mU*fU*mUmUmUfAmUmUmCmCmAmAmGfAmAfCmUmCmU*m | 573 |
| | | G*mU | |
| Conjugate | SS | mA*mG*mAmGfUmUfCfUfUmGmGmAmAmUmAmAmAmAmA*Ga | 574 |
| 136 | | lNAc(L96) | |
| | AS | mU*fU*mUmUmUfAmUmUmCmCmAmAmGfAmAfCmUmCmU*m | 573 |
| | | G*mU | |
| Conjugate | SS | mA*mG*mAmGfUmUfCfUfUmGmGmAmAmUmAmAmAmAmA*Ga | 574 |
| 137 | | lNAc(L96) | |
| | AS | mU*fU*mUmUmUfAmUfUfCmCmAmAmGfAmAfCmUmCmU*mG* | 575 |
| | | mU | |
| Conjugate | SS | mC*mA*mGmAmGmUmUfCfUfUmGmGmAmAmUmAmAmAmAm | 576 |
| 138 | | A*GalNAc(L96) | |
| | AS | mU*fU*mUmUmUfAmUmUmCmCmAmAmGfAmAfCmUmCmUmG | 577 |
| | | *mU*mG | |
| Conjugate | SS | mC*mA*mGmAmGfUmUfCfUfUmGmGmAmAmUmAmAmAmAmA | 578 |
| 139 | | *GalNAc(L96) | |
| | AS | mU*fU*mUmUmUfAmUmUmCmCmAmAmGfAmAfCmUmCmUmG | 577 |
| | | *mU*mG | |
| Conjugate | SS | mC*mA*mGmAmGfUmUfCfUfUmGmGmAmAmUmAmAmAmAmA | 578 |
| 140 | | *GalNAc(L96) | |
| | AS | mU*fU*mUmUmUfAmUfUfCmCmAmAmGfAmAfCmUmCmUmG*m | 579 |
| | | U*mG | |
| Conjugate | SS | mA*mC*mAmGmAmGmUmUfCfUfUmGmGmAmAmUmAmAmAm | 580 |
| 141 | | AmAGalNAc(L96) | |
| | AS | mU*fU*mUmUmUfAmUmUmCmCmAmAmGfAmAfCmUmCmUmG | 581 |
| | | mU*mG*mA | |
| Conjugate | SS | mA*mC*mAmGmAmGfUmUfCfUfUmGmGmAmAmUmAmAmAmA | 582 |
| 142 | | mAGalNAc(L96) | |
| | AS | mU*fU*mUmUmUfAmUmUmCmCmAmAmGfAmAfCmUmCmUmG | 581 |
| | | mU*mG*mA | |
| Conjugate | SS | mA*mC*mAmGmAmGfUmUfCfUfUmGmGmAmAmUmAmAmAmA | 582 |
| 143 | | mAGalNAc(L96) | |
| | AS | mU*fU*mUmUmUfAmUfUfCmCmAmAmGfAmAfCmUmCmUmGm | 583 |
| | | U*mG*mA | |
| Conjugate | SS | mA*mG*mAmGmUmUfCfUfUmGmGmAmAmUmAmAmAmAmA*G | 572 |
| 144 | | alNAc(L96) | |
| | AS | eVPmU*fU*mUmUmUfAmUmUmCmCmAmAmGfAmAfCmUmCmU | 584 |
| | | *mG*mU | |
| Conjugate | SS | mA*mG*mAmGfUmUfCfUfUmGmGmAmAmUmAmAmAmAmA*Ga | 574 |
| 145 | | lNAc(L96) | |
| | AS | eVPmU*fU*mUmUmUfAmUmUmCmCmAmAmGfAmAfCmUmCmU | 584 |
| | | *mG*mU | |
| Conjugate | SS | mA*mG*mAmGfUmUfCfUfUmGmGmAmAmUmAmAmAmAmA*Ga | 574 |
| 146 | | lNAc(L96) | |
| | AS | eVPmU*fU*mUmUmUfAmUfUfCmCmAmAmGfAmAfCmUmCmU* | 585 |
| | | mG*mU | |
| Conjugate | SS | mC*mA*mGmAmGmUmUfCfUfUmGmGmAmAmUmAmAmAmAm | 576 |
| 147 | | A*GalNAc(L96) | |
| | AS | eVPmU*fU*mUmUmUfAmUmUmCmCmAmAmGfAmAfCmUmCmU | 586 |
| | | mG*mU*mG | |
| Conjugate | SS | mC*mA*mGmAmGfUmUfCfUfUmGmGmAmAmUmAmAmAmAmA | 578 |
| 148 | | *GalNAc(L96) | |
| | AS | eVPmU*fU*mUmUmUfAmUmUmCmCmAmAmGfAmAfCmUmCmU | 586 |
| | | mG*mU*mG | |
| Conjugate | SS | mC*mA*mGmAmGfUmUfCfUfUmGmGmAmAmUmAmAmAmAmA | 578 |
| 149 | | *GalNAc(L96) | |
| | AS | eVPmU*fU*mUmUmUfAmUfUfCmCmAmAmGfAmAfCmUmCmUm | 587 |
| | | G*mU*mG | |
| Conjugate | SS | mA*mC*mAmGmAmGmUmUfCfUfUmGmGmAmAmUmAmAmAm | 580 |
| 150 | | AmAGalNAc(L96) | |
| | AS | eVPmU*fU*mUmUmUfAmUmUmCmCmAmAmGfAmAfCmUmCmU | 588 |
| | | mGmU*mG*mA | |
| Conjugate | SS | mA*mC*mAmGmAmGfUmUfCfUfUmGmGmAmAmUmAmAmAmA | 582 |
| 151 | | mAGalNAc(L96) | |
| | AS | eVPmU*fU*mUmUmUfAmUmUmCmCmAmAmGfAmAfCmUmCmU | 588 |
| | | mGmU*mG*mA | |
| Conjugate | SS | mA*mC*mAmGmAmGfUmUfCfUfUmGmGmAmAmUmAmAmAmA | 582 |
| 152 | | mAGalNAc(L96) | |
| | AS | eVPmU*fU*mUmUmUfAmUfUfCmCmAmAmGfAmAfCmUmCmUm | 589 |
| | | GmU*mG*mA | |
| Conjugate | SS | mU*mC*mUmUmGmGfAfAfUmAmAmAmAmGmCmAmAmCmU*G | 590 |
| 153 | | alNAc(L96) | |
| | AS | mA*fG*mUmUmGfCmUmUmUmUmAmUmUfCmCfAmAmGmA*m | 591 |
| | | A*mC | |
| Conjugate | SS | mU*mC*mUmUfGmGfAfAfUmAmAmAmAmGmCmAmAmCmU*Ga | 592 |
| 154 | | lNAc(L96) | |
| | AS | mA*fG*mUmUmGfCmUmUmUmUmAmUmUfCmCfAmAmGmA*m | 591 |
| | | A*mC | |
| Conjugate | SS | mU*mC*mUmUfGmGfAfAfUmAmAmAmAmGmCmAmAmCmU*Ga | 592 |
| 155 | | lNAc(L96) | |
| | AS | mA*fG*mUmUmGfCmUfUfUmUmAmUmUfCmCfAmAmGmA*mA* | 593 |
| | | mC | |
| Conjugate | SS | mU*mU*mCmUmUmGmGfAfAfUmAmAmAmAmGmCmAmAmCm | 594 |
| 156 | | U*GalNAc(L96) | |
| | AS | mA*fG*mUmUmGfCmUmUmUmUmAmUmUfCmCfAmAmGmAmA | 595 |
| | | *mC*mU | |
| Conjugate | SS | mU*mU*mCmUmUfGmGfAfAfUmAmAmAmAmGmCmAmAmCmU | 596 |
| 157 | | *GalNAc(L96) | |
| | AS | mA*fG*mUmUmGfCmUmUmUmUmAmUmUfCmCfAmAmGmAmA | 595 |
| | | *mC*mU | |
| Conjugate | SS | mU*mU*mCmUmUfGmGfAfAfUmAmAmAmAmGmCmAmAmCmU | 596 |
| 158 | | *GalNAc(L96) | |
| | AS | mA*fG*mUmUmGfCmUfUfUmUmAmUmUfCmCfAmAmGmAmA* | 597 |
| | | mC*mU | |
| Conjugate | SS | mG*mU*mUmCmUmUmGmGfAfAfUmAmAmAmAmGmCmAmAm | 598 |
| 159 | | CmUGalNAc(L96) | |
| | AS | mA*fG*mUmUmGfCmUmUmUmUmAmUmUfCmCfAmAmGmAmA | 425 |
| | | mC*mU*mC | |
| Conjugate | SS | mG*mU*mUmCmUmUfGmGfAfAfUmAmAmAmAmGmCmAmAmC | 424 |
| 160 | | mUGalNAc(L96) | |
| | AS | mA*fG*mUmUmGfCmUmUmUmUmAmUmUfCmCfAmAmGmAmA | 425 |
| | | mC*mU*mC | |
| Conjugate | SS | mG*mU*mUmCmUmUfGmGfAfAfUmAmAmAmAmGmCmAmAmC | 424 |
| 161 | | mUGalNAc(L96) | |
| | AS | mA*fG*mUmUmGfCmUfUfUmUmAmUmUfCmCfAmAmGmAmAm | 431 |
| | | C*mU*mC | |
| Conjugate | SS | mU*mC*mUmUmGmGfAfAfUmAmAmAmAmGmCmAmAmCmU*G | 590 |
| 162 | | alNAc(L96) | |
| | AS | eVPmA*fG*mUmUmGfCmUmUmUmUmAmUmUfCmCfAmAmGmA | 599 |
| | | *mA*mC | |
| Conjugate | SS | mU*mC*mUmUfGmGfAfAfUmAmAmAmAmGmCmAmAmCmU*Ga | 592 |
| 163 | | lNAc(L96) | |
| | AS | eVPmA*fG*mUmUmGfCmUmUmUmUmAmUmUfCmCfAmAmGmA | 599 |
| | | *mA*mC | |
| Conjugate | SS | mU*mC*mUmUfGmGfAfAfUmAmAmAmAmGmCmAmAmCmU*Ga | 592 |
| 164 | | lNAc(L96) | |
| | AS | eVPmA*fG*mUmUmGfCmUfUfUmUmAmUmUfCmCfAmAmGmA* | 600 |
| | | mA*mC | |
| Conjugate | SS | mU*mU*mCmUmUmGmGfAfAfUmAmAmAmAmGmCmAmAmCm | 594 |
| 165 | | U*GalNAc(L96) | |
| | AS | eVPmA*fG*mUmUmGfCmUmUmUmUmAmUmUfCmCfAmAmGmA | 601 |
| | | mA*mC*mU | |
| Conjugate | SS | mU*mU*mCmUmUfGmGfAfAfUmAmAmAmAmGmCmAmAmCmU | 596 |
| 166 | | *GalNAc(L96) | |
| | AS | eVPmA*fG*mUmUmGfCmUmUmUmUmAmUmUfCmCfAmAmGmA | 601 |
| | | mA*mC*mU | |
| Conjugate | SS | mU*mU*mCmUmUfGmGfAfAfUmAmAmAmAmGmCmAmAmCmU | 596 |
| 167 | | *GalNAc(L96) | |
| | AS | eVPmA*fG*mUmUmGfCmUfUfUmUmAmUmUfCmCfAmAmGmAm | 602 |
| | | A*mC*mU | |
| Conjugate | SS | mG*mU*mUmCmUmUmGmGfAfAfUmAmAmAmAmGmCmAmAm | 598 |
| 168 | | CmUGalNAc(L96) | |
| | AS | eVPmA*fG*mUmUmGfCmUmUmUmUmAmUmUfCmCfAmAmGmA | 603 |
| | | mAmC*mU*mC | |
| Conjugate | SS | mG*mU*mUmCmUmUfGmGfAfAfUmAmAmAmAmGmCmAmAmC | 424 |
| 169 | | mUGalNAc(L96) | |
| | AS | eVPmA*fG*mUmUmGfCmUmUmUmUmAmUmUfCmCfAmAmGmA | 603 |
| | | mAmC*mU*mC | |
| Conjugate | SS | mG*mU*mUmCmUmUfGmGfAfAfUmAmAmAmAmGmCmAmAmC | 424 |
| 170 | | mUGalNAc(L96) | |
| | AS | eVPmA*fG*mUmUmGfCmUfUfUmUmAmUmUfCmCfAmAmGmAm | 604 |
| | | AmC*mU*mC | |
| Conjugate | SS | mC*mU*mUmGmGmAfAfUfAmAmAmAmGmCmAmAmCmCmU*G | 605 |
| 171 | | alNAc(L96) | |
| | AS | mA*fG*mGmUmUfGmCmUmUmUmUmAmUfUmCfCmAmAmG*m | 606 |
| | | A*mA | |
| Conjugate | SS | mC*mU*mUmGfGmAfAfUfAmAmAmAmGmCmAmAmCmCmU*Ga | 607 |
| 172 | | lNAc(L96) | |
| | AS | mA*fG*mGmUmUfGmCmUmUmUmUmAmUfUmCfCmAmAmG*m | 606 |
| | | A*mA | |
| Conjugate | SS | mC*mU*mUmGfGmAfAfUfAmAmAmAmGmCmAmAmCmCmU*Ga | 607 |
| 173 | | lNAc(L96) | |
| | AS | mA*fG*mGmUmUfGmCfUfUmUmUmAmUfUmCfCmAmAmG*mA* | 608 |
| | | mA | |
| Conjugate | SS | mU*mC*mUmUmGmGmAfAfUfAmAmAmAmGmCmAmAmCmCm | 609 |
| 174 | | U*GalNAc(L96) | |
| | AS | mA*fG*mGmUmUfGmCmUmUmUmUmAmUfUmCfCmAmAmGmA | 610 |
| | | *mA*mC | |
| Conjugate | SS | mU*mC*mUmUmGfGmAfAfUfAmAmAmAmGmCmAmAmCmCmU | 611 |
| 175 | | *GalNAc(L96) | |
| | AS | mA*fG*mGmUmUfGmCmUmUmUmUmAmUfUmCfCmAmAmGmA | 610 |
| | | *mA*mC | |
| Conjugate | SS | mU*mC*mUmUmGfGmAfAfUfAmAmAmAmGmCmAmAmCmCmU | 611 |
| 176 | | *GalNAc(L96) | |
| | AS | mA*fG*mGmUmUfGmCfUfUmUmUmAmUfUmCfCmAmAmGmA* | 612 |
| | | mA*mC | |
| Conjugate | SS | mU*mU*mCmUmUmGmGmAfAfUfAmAmAmAmGmCmAmAmCm | 613 |
| 177 | | CmUGalNAc(L96) | |
| | AS | mA*fG*mGmUmUfGmCmUmUmUmUmAmUfUmCfCmAmAmGmA | 614 |
| | | mA*mC*mU | |
| Conjugate | SS | mU*mU*mCmUmUmGfGmAfAfUfAmAmAmAmGmCmAmAmCmC | 615 |
| 178 | | mUGalNAc(L96) | |
| | AS | mA*fG*mGmUmUfGmCmUmUmUmUmAmUfUmCfCmAmAmGmA | 614 |
| | | mA*mC*mU | |
| Conjugate | SS | mU*mU*mCmUmUmGfGmAfAfUfAmAmAmAmGmCmAmAmCmC | 615 |
| 179 | | mUGalNAc(L96) | |
| | AS | mA*fG*mGmUmUfGmCfUfUmUmUmAmUfUmCfCmAmAmGmAm | 616 |
| | | A*mC*mU | |
| Conjugate | SS | mC*mU*mUmGmGmAfAfUfAmAmAmAmGmCmAmAmCmCmU*G | 605 |
| 180 | | alNAc(L96) | |
| | AS | eVPmA*fG*mGmUmUfGmCmUmUmUmUmAmUfUmCfCmAmAmG | 617 |
| | | *mA*mA | |
| Conjugate | SS | mC*mUmUmGfGmAfAfUfAmAmAmAmGmCmAmAmCmCmU*Ga | 607 |
| 181 | | lNAc(L96) | |
| | AS | eVPmA*fG*mGmUmUfGmCmUmUmUmUmAmUfUmCfCmAmAmG | 617 |
| | | *mA*mA | |
| Conjugate | SS | mC*mU*mUmGfGmAfAfUfAmAmAmAmGmCmAmAmCmCmU*Ga | 607 |
| 182 | | lNAc(L96) | |
| | AS | eVPmA*fG*mGmUmUfGmCfUfUmUmUmAmUfUmCfCmAmAmG* | 618 |
| | | mA*mA | |
| Conjugate | SS | mU*mC*mUmUmGmGmAfAfUfAmAmAmAmGmCmAmAmCmCm | 609 |
| 183 | | U*GalNAc(L96) | |
| | AS | eVPmA*fG*mGmUmUfGmCmUmUmUmUmAmUfUmCfCmAmAmG | 619 |
| | | mA*mA*mC | |
| Conjugate | SS | mU*mC*mUmUmGfGmAfAfUfAmAmAmAmGmCmAmAmCmCmU | 611 |
| 184 | | *GalNAc(L96) | |
| | AS | eVPmA*fG*mGmUmUfGmCmUmUmUmUmAmUfUmCfCmAmAmG | 619 |
| | | mA*mA*mC | |
| Conjugate | SS | mU*mC*mUmUmGfGmAfAfUfAmAmAmAmGmCmAmAmCmCmU | 611 |
| 185 | | *GalNAc(L96) | |
| | AS | eVPmA*fG*mGmUmUfGmCfUfUmUmUmAmUfUmCfCmAmAmGm | 620 |
| | | A*mA*mC | |
| Conjugate | SS | mU*mU*mCmUmUmGmGmAfAfUfAmAmAmAmGmCmAmAmCm | 613 |
| 186 | | CmUGalNAc(L96) | |
| | AS | eVPmA*fG*mGmUmUfGmCmUmUmUmUmAmUfUmCfCmAmAmG | 621 |
| | | mAmA*mC*mU | |
| Conjugate | SS | mU*mU*mCmUmUmGfGmAfAfUfAmAmAmAmGmCmAmAmCmC | 615 |
| 187 | | mUGalNAc(L96) | |
| | AS | eVPmA*fG*mGmUmUfGmCmUmUmUmUmAmUfUmCfCmAmAmG | 621 |
| | | mAmA*mC*mU | |
| Conjugate | SS | mU*mU*mCmUmUmGfGmAfAfUfAmAmAmAmGmCmAmAmCmC | 615 |
| 188 | | mUGalNAc(L96) | |
| | AS | eVPmA*fG*mGmUmUfGmCfUfUmUmUmAmUfUmCfCmAmAmGm | 622 |
| | | AmA*mC*mU | |
| Conjugate | SS | mU*mU*mGmGmAmAfUfAfAmAmAmGmCmAmAmCmCmUmU*G | 623 |
| 189 | | alNAc(L96) | |
| | AS | mA*fA*mGmGmUfUmGmCmUmUmUmUmAfUmUfCmCmAmA*m | 624 |
| | | G*mA | |
| Conjugate | SS | mU*mU*mGmGfAmAfUfAfAmAmAmGmCmAmAmCmCmUmU*Ga | 625 |
| 190 | | lNAc(L96) | |
| | AS | mA*fA*mGmGmUfUmGmCmUmUmUmUmAfUmUfCmCmAmA*m | 624 |
| | | G*mA | |
| Conjugate | SS | mU*mU*mGmGfAmAfUfAfAmAmAmGmCmAmAmCmCmUmU*Ga | 625 |
| 191 | | lNAc(L96) | |
| | AS | mA*fA*mGmGmUfUmGfCfUmUmUmUmAfUmUfCmCmAmA*mG* | 626 |
| | | mA | |
| Conjugate | SS | mC*mU*mUmGmGmAmAfUfAfAmAmAmGmCmAmAmCmCmUm | 627 |
| 192 | | U*GalNAc(L96) | |
| | AS | mA*fA*mGmGmUfUmGmCmUmUmUmUmAfUmUfCmCmAmAmG | 628 |
| | | *mA*mA | |
| Conjugate | SS | mC*mU*mUmGmGfAmAfUfAfAmAmAmGmCmAmAmCmCmUmU | 629 |
| 193 | | *GalNAc(L96) | |
| | AS | mA*fA*mGmGmUfUmGmCmUmUmUmUmAfUmUfCmCmAmAmG | 628 |
| | | *mA*mA | |
| Conjugate | SS | mC*mU*mUmGmGfAmAfUfAfAmAmAmGmCmAmAmCmCmUmU | 629 |
| 194 | | *GalNAc(L96) | |
| | AS | mA*fA*mGmGmUfUmGfCfUmUmUmUmAfUmUfCmCmAmAmG* | 630 |
| | | mA*mA | |
| Conjugate | SS | mU*mC*mUmUmGmGmAmAfUfAfAmAmAmGmCmAmAmCmCm | 631 |
| 195 | | UmUGalNAc(L96) | |
| | AS | mA*fA*mGmGmUfUmGmCmUmUmUmUmAfUmUfCmCmAmAmG | 427 |
| | | mA*mA*mC | |
| Conjugate | SS | mU*mC*mUmUmGmGfAmAfUfAfAmAmAmGmCmAmAmCmCmU | 426 |
| 196 | | mUGalNAc(L96) | |
| | AS | mA*fA*mGmGmUfUmGmCmUmUmUmUmAfUmUfCmCmAmAmG | 427 |
| | | mA*mA*mC | |
| Conjugate | SS | mU*mC*mUmUmGmGfAmAfUfAfAmAmAmGmCmAmAmCmCmU | 426 |
| 197 | | mUGalNAc(L96) | |
| | AS | mA*fA*mGmGmUfUmGfCfUmUmUmUmAfUmUfCmCmAmAmGm | 432 |
| | | A*mA*mC | |
| Conjugate | SS | mU*mU*mGmGmAmAfUfAfAmAmAmGmCmAmAmCmCmUmU*G | 623 |
| 198 | | alNAc(L96) | |
| | AS | eVPmA*fA*mGmGmUfUmGmCmUmUmUmUmAfUmUfCmCmAmA | 632 |
| | | *mG*mA | |
| Conjugate | SS | mU*mU*mGmGfAmAfUfAfAmAmAmGmCmAmAmCmCmUmU*Ga | 625 |
| 199 | | lNAc(L96) | |
| | AS | eVPmA*fA*mGmGmUfUmGmCmUmUmUmUmAfUmUfCmCmAmA | 632 |
| | | *mG*mA | |
| Conjugate | SS | mU*mU*mGmGfAmAfUfAfAmAmAmGmCmAmAmCmCmUmU*Ga | 625 |
| 200 | | lNAc(L96) | |
| | AS | eVPmA*fA*mGmGmUfUmGfCfUmUmUmUmAfUmUfCmCmAmA* | 633 |
| | | mG*mA | |
| Conjugate | SS | mC*mU*mUmGmGmAmAfUfAfAmAmAmGmCmAmAmCmCmUm | 627 |
| 201 | | U*GalNAc(L96) | |
| | AS | eVPmA*fA*mGmGmUfUmGmCmUmUmUmUmAfUmUfCmCmAmA | 634 |
| | | mG*mA*mA | |
| Conjugate | SS | mC*mU*mUmGmGfAmAfUfAfAmAmAmGmCmAmAmCmCmUmU | 629 |
| 202 | | *GalNAc(L96) | |
| | AS | eVPmA*fA*mGmGmUfUmGmCmUmUmUmUmAfUmUfCmCmAmA | 634 |
| | | mG*mA*mA | |
| Conjugate | SS | mC*mU*mUmGmGfAmAfUfAfAmAmAmGmCmAmAmCmCmUmU | 629 |
| 203 | | *GalNAc(L96) | |
| | AS | eVPmA*fA*mGmGmUfUmGfCfUmUmUmUmAfUmUfCmCmAmAm | 635 |
| | | G*mA*mA | |
| Conjugate | SS | mU*mC*mUmUmGmGmAmAfUfAfAmAmAmGmCmAmAmCmCm | 631 |
| 204 | | UmUGalNAc(L96) | |
| | AS | eVPmA*fA*mGmGmUfUmGmCmUmUmUmUmAfUmUfCmCmAmA | 636 |
| | | mGmA*mA*mC | |
| Conjugate | SS | mU*mC*mUmUmGmGfAmAfUfAfAmAmAmGmCmAmAmCmCmU | 426 |
| 205 | | mUGalNAc(L96) | |
| | AS | eVPmA*fA*mGmGmUfUmGmCmUmUmUmUmAfUmUfCmCmAmA | 636 |
| | | mGmA*mA*mC | |
| Conjugate | SS | mU*mC*mUmUmGmGfAmAfUfAfAmAmAmGmCmAmAmCmCmU | 426 |
| 206 | | mUGalNAc(L96) | |
| | AS | eVPmA*fA*mGmGmUfUmGfCfUmUmUmUmAfUmUfCmCmAmAm | 637 |
| | | GmA*mA*mC | |
| Conjugate | SS | mA*mA*mUmAmAmAfAfGfCmAmAmCmCmUmCmAmGmAmA*G | 638 |
| 207 | | alNAc(L96) | |
| | AS | mU*fU*mCmUmGfAmGmGmUmUmGmCmUfUmUfUmAmUmU*m | 639 |
| | | C*mC | |
| Conjugate | SS | mA*mA*mUmAfAmAfAfGfCmAmAmCmCmUmCmAmGmAmA*Ga | 640 |
| 208 | | lNAc(L96) | |
| | AS | mU*fU*mCmUmGfAmGmGmUmUmGmCmUfUmUfUmAmUmU*m | 639 |
| | | C*mC | |
| Conjugate | SS | mA*mA*mUmAfAmAfAfGfCmAmAmCmCmUmCmAmGmAmA*Ga | 640 |
| 209 | | lNAc(L96) | |
| | AS | mU*fU*mCmUmGfAmGfGfUmUmGmCmUfUmUfUmAmUmU*mC* | 641 |
| | | mC | |
| Conjugate | SS | mG*mA*mAmUmAmAmAfAfGfCmAmAmCmCmUmCmAmGmAm | 642 |
| 210 | | A*GalNAc(L96) | |
| | AS | mU*fU*mCmUmGfAmGmGmUmUmGmCmUfUmUfUmAmUmUmC | 643 |
| | | *mC*mA | |
| Conjugate | SS | mG*mA*mAmUmAfAmAfAfGfCmAmAmCmCmUmCmAmGmAmA | 644 |
| 211 | | *GalNAc(L96) | |
| | AS | mU*fU*mCmUmGfAmGmGmUmUmGmCmUfUmUfUmAmUmUmC | 643 |
| | | *mC*mA | |
| Conjugate | SS | mG*mA*mAmUmAfAmAfAfGfCmAmAmCmCmUmCmAmGmAmA | 644 |
| 212 | | *GalNAc(L96) | |
| | AS | mU*fU*mCmUmGfAmGfGfUmUmGmCmUfUmUfUmAmUmUmC* | 645 |
| | | mC*mA | |
| Conjugate | SS | mG*mG*mAmAmUmAmAmAfAfGfCmAmAmCmCmUmCmAmGm | 646 |
| 213 | | AmAGalNAc(L96) | |
| | AS | mU*fU*mCmUmGfAmGmGmUmUmGmCmUfUmUfUmAmUmUmC | 429 |
| | | mC*mA*mA | |
| Conjugate | SS | mG*mG*mAmAmUmAfAmAfAfGfCmAmAmCmCmUmCmAmGmA | 428 |
| 214 | | mAGalNAc(L96) | |
| | AS | mU*fU*mCmUmGfAmGmGmUmUmGmCmUfUmUfUmAmUmUmC | 429 |
| | | mC*mA*mA | |
| Conjugate | SS | mG*mG*mAmAmUmAfAmAfAfGfCmAmAmCmCmUmCmAmGmA | 428 |
| 215 | | mAGalNAc(L96) | |
| | AS | mU*fU*mCmUmGfAmGfGfUmUmGmCmUfUmUfUmAmUmUmCm | 433 |
| | | C*mA*mA | |
| Conjugate | SS | mA*mA*mUmAmAmAfAfGfCmAmAmCmCmUmCmAmGmAmA*G | 638 |
| 216 | | alNAc(L96) | |
| | AS | eVPmU*fU*mCmUmGfAmGmGmUmUmGmCmUfUmUfUmAmUmU | 647 |
| | | *mC*mC | |
| Conjugate | SS | mA*mA*mUmAfAmAfAfGfCmAmAmCmCmUmCmAmGmAmA*Ga | 640 |
| 217 | | lNAc(L96) | |
| | AS | eVPmU*fU*mCmUmGfAmGmGmUmUmGmCmUfUmUfUmAmUmU | 647 |
| | | *mC*mC | |
| Conjugate | SS | mA*mA*mUmAfAmAfAfGfCmAmAmCmCmUmCmAmGmAmA*Ga | 640 |
| 218 | | lNAc(L96) | |
| | AS | eVPmU*fU*mCmUmGfAmGfGfUmUmGmCmUfUmUfUmAmUmU* | 648 |
| | | mC*mC | |
| Conjugate | SS | mG*mA*mAmUmAmAmAfAfGfCmAmAmCmCmUmCmAmGmAm | 642 |
| 219 | | A*GalNAc(L96) | |
| | AS | eVPmU*fU*mCmUmGfAmGmGmUmUmGmCmUfUmUfUmAmUmU | 649 |
| | | mC*mC*mA | |
| Conjugate | SS | mG*mA*mAmUmAfAmAfAfGfCmAmAmCmCmUmCmAmGmAmA | 644 |
| 220 | | *GalNAc(L96) | |
| | AS | eVPmU*fU*mCmUmGfAmGmGmUmUmGmCmUfUmUfUmAmUmU | 649 |
| | | mC*mC*mA | |
| Conjugate | SS | mG*mA*mAmUmAfAmAfAfGfCmAmAmCmCmUmCmAmGmAmA | 644 |
| 221 | | *GalNAc(L96) | |
| | AS | eVPmU*fU*mCmUmGfAmGfGfUmUmGmCmUfUmUfUmAmUmUm | 650 |
| | | C*mC*mA | |
| Conjugate | SS | mG*mG*mAmAmUmAmAmAfAfGfCmAmAmCmCmUmCmAmGm | 646 |
| 222 | | AmAGalNAc(L96) | |
| | AS | eVPmU*fU*mCmUmGfAmGmGmUmUmGmCmUfUmUfUmAmUmU | 651 |
| | | mCmC*mA*mA | |
| Conjugate | SS | mG*mG*mAmAmUmAfAmAfAfGfCmAmAmCmCmUmCmAmGmA | 428 |
| 223 | | mAGalNAc(L96) | |
| | AS | eVPmU*fU*mCmUmGfAmGmGmUmUmGmCmUfUmUfUmAmUmU | 651 |
| | | mCmC*mA*mA | |
| Conjugate | SS | mG*mG*mAmAmUmAfAmAfAfGfCmAmAmCmCmUmCmAmGmA | 428 |
| 224 | | mAGalNAc(L96) | |
| | AS | eVPmU*fU*mCmUmGfAmGfGfUmUmGmCmUfUmUfUmAmUmUm | 652 |
| | | CmC*mA*mA | |
| Conjugate | SS | mA*mG*mUmUmCmUfUmGfGfAfAmUmAmAmAmAmGmCmAmA | 422 |
| 225 | | mUGalNAc(L96) | |
| | AS | eVPmA*fU*mUmGgnCfUmUmUmUmAmUmUmCfCmAfAmGmAm | 653 |
| | | AmCmU*mC*mU | |
| Conjugate | SS | mA*mG*mUmUmCmUfUmGfGfAfAmUmAmAmAmAmGmCmAmA | 422 |
| 226 | | mUGalNAc(L96) | |
| | AS | eVPmA*fU*mUmGmCgnTmUmUmUmAmUmUmCfCmAfAmGmAm | 654 |
| | | AmCmU*mC*mU | |
| Conjugate | SS | mA*mG*mUmUmCmUfUmGfGfAfAmUmAmAmAmAmGmCmAmA | 422 |
| 227 | | mUGalNAc(L96) | |
| | AS | eVPmA*fU*mUmGmCfUgnTmUmUmAmUmUmCfCmAfAmGmAmA | 655 |
| | | mCmU*mC*mU | |
| Conjugate | SS | mA*mG*mUmUmCmUfUmGfGfAfAmUmAmAmAmAmGmCmAmA | 422 |
| 228 | | mUGalNAc(L96) | |
| | AS | eVPmA*fU*mUmGmCfUmUgnTmUmAmUmUmCfCmAfAmGmAmA | 656 |
| | | mCmU*mC*mU | |
| Conjugate | SS | mA*mG*mUmUmCmUfUmGfGfAfAmUmAmAmAmAmGmCmAmA | 422 |
| 229 | | mUGalNAc(L96) | |
| | AS | eVPmA*fU*mUmGmCmUmUmUmUmAmUmUmCfCmAfAmGmAm | 657 |
| | | AmCmU*mC*mU | |
| Conjugate | SS | mA*mG*mUmUmCmUfUmGfGfAfAmUmAmAmAmAmGmCmAmA | 422 |
| 230 | | mUGalNAc(L96) | |
| | AS | eVPmA*fU*mUmGmCfUmUmUmUmAmUmUmCfCmAfAmGmAmA | 658 |
| | | mCmU*ml*mU | |
| Conjugate | SS | mG*mU*mCmUfUmGfGfAfAmUmAmAmAmAmGmCmAmAmUGal | 422 |
| 231 | | NAc(L96) | |
| | AS | eVPmA*fU*mUmGmCfUmUmUmUmAmUmUmCfCmAfAmGmAmA | 460 |
| | | *mC*mU | |
| Conjugate | SS | tnG*mU*mUmCmUfUmGfGfAfAmUmAmAmAmAmGmCmAmAmU | 514 |
| 232 | | *GalNAc(L96) | |
| | AS | eVPmA*fU*mUmGmCfUmUmUmUmAmUmUmCfCmAfAmGmAmA | 459 |
| | | mC*mU*mC | |
| Conjugate | SS | mG*mU*mUmCmUfUmGfGfAfAmUmAmAmAmAmGmCmAmAmU | 516 |
| 233 | | *GalNAc(L96) | |
| | AS | eVPmA*fU*mUmGmCfUmUmUmUmAmUmUmCfCmAfAmGmAmA | 659 |
| | | mC*tnT*mC | |
| Conjugate | SS | mG*mU*mUmCmUfUmGfGfAfAmUmAmAmAmAmGmCmAmAmU | 516 |
| 234 | | *GalNAc(L96) | |
| | AS | eVPmA*fU*mUmGmCfUmUmUmUmAmUmUmCfCmAfAmGmAmA | 459 |
| | | mC*mU*mC | |
| Conjugate | SS | mG*mU*mUmCmUfUmGfGfAfAmUmAmAmAmAmGmCmAmAmU | 516 |
| 235 | | *GalNAc(L96) | |
| | AS | eVPmA*fU*mUmGmCfUmUmUmUmAmUmUmCfCmAfAmGmAmA | 660 |
| | | mC*ml*mC | |
| Conjugate | SS | tnA*mG*mUmUmCmUmUmGfGfAfAmUmAmAmAmAmGmCmAm | 502 |
| 236 | | AmUGalNAc(L96) | |
| | AS | eVPmA*fU*mUmGmCfUmUmUmUmAmUmUmCfCmAfAmGmAmA | 525 |
| | | mCmU*mC*mU | |
| Conjugate | SS | mA*mG*mUmUmCmUmUmGfGfAfAmUmAmAmAmAmGmCmAm | 464 |
| 237 | | AmUGalNAc(L96) | |
| | AS | eVPmA*fU*mUmGmCmUmUmUmUmAmUmUmCfCmAfAmGmAm | 657 |
| | | AmCmU*mC*mU | |
| Conjugate | SS | mA*mG*mUmUmCmUmUmGfGfAfAmUmAmAmAmAmGmCmAm | 464 |
| 238 | | AmUGalNAc(L96) | |
| | AS | eVPmA*fU*mUmGmCfUmUmUmUmAmUmUmCfCmAfAmGmAmA | 658 |
| | | mCmU*ml*mU | |
| Conjugate | SS | mA*mG*mUmUmCdTmUmGfGfAfAmUmAmAmAmAmGmCmAmA | 498 |
| 239 | | mUGalNAc(L96) | |
| | AS | eVPmA*fU*mUmGmCfUmUmUmUmAmUmUmCfCmAfAmGmAmA | 525 |
| | | mCmU*mC*mU | |
| Conjugate | SS | mG*mU*mUmCmUmUmGfGfAfAmUmAmAmAmAmGmCmAmAm | 519 |
| 240 | | U*GalNAc(L96) | |
| | AS | eVPmA*fU*mUmGmCfUmUmUmUmAmUmUmCfCmAfAmGmAmA | 660 |
| | | mC*mI*mC | |
| Conjugate | SS | mG*mU*mUmCmUmUmGfGfAfAmUmAmAmAmAmGmCmAmAm | 519 |
| 241 | | U*GalNAc(L96) | |
| | AS | eVPmA*fU*mUmGmCfUmUmUmUmAmUmUmCfCmAfAmGmAmA | 659 |
| | | mC*tnT*mC | |
| Conjugate | SS | mG*mU*mUmCdTmUmGfGfAfAmUmAmAmAmAmGmCmAmAmU | 513 |
| 242 | | *GalNAc(L96) | |
| | AS | eVPmA*fU*mUmGmCfUmUmUmUmAmUmUmCfCmAfAmGmAmA | 459 |
| | | mC*mU*mC | |
| Conjugate | SS | fC*mA*fGmAfGmUfUmCfUmUfGmGfAmAfUmAfAmAfA*mU*mU | 661 |
| PC c | | GalNAc(L96) | |
| (reference) | AS | mU*fU*mUfUmAfUmUfCmCfAmAfGmAfAmCfUmCfUmG*mU*mU | 662 |

Specifically, uppercase C, G, U, and A represent the base composition of a nucleotide; lowercase d represents that the nucleotide immediately to the right of the letter d is a deoxyribonucleotide; lowercase m represents that the nucleotide immediately to the right of the letter m is a 2′-methoxy nucleotide; symbol f represents that the nucleotide immediately to the right of the symbol f is a 2′-fluoro nucleotide; gn represents that the nucleotide immediately to the right of the symbol gn is a glycerol nucleotide (GNA); tn represents that the nucleotide immediately to the right of the symbol tn is a threose nucleotide (TNA); mI refers to inosine with a 2′-methoxy substitution on the ribose moiety; symbol * represents that the two adjacent nucleotides flanking the symbol * are linked via a phosphorothioate linkage; eVP represents that the nucleotide immediately to the right of the symbol eVP is a vinylphosphonate-modified nucleotide; iab represents an inverted abasic residue. GalNAc(L96) refers to conjugation with the linker-targeting ligand moiety GalNAc(L96) at this position.

[0141] The sequence of duplex 143 was chemically modified to obtain various modified siRNAs. The sequences of the modified duplexes are as follows:

TABLE 3
Sequences of modified duplexes

| | Strand | | SEQ ID |
|---|---|---|---|
| No. | type | Sequence (5′->3′) | NO |
| Modified | SS | mA*mG*mUmUmCmUmUmGfGfAfAmUmAmAmAmAmGmCmAmA | 667 |
| | | mU | |
| duplex 1 | AS | mA*fU*mUmGmCmUmUmUmUmAmUfUmCfCmAfAmGmAmAmCm | 668 |
| | | U*mC*mU | |
| Modified | SS | mA*mG*mUmUmCmUmUmGfGfAfAmUmAmAmAmAmGmCmAmA | 667 |
| | | mU | |
| duplex 2 | AS | mA*fU*mUmGfCmUmUmUmUmAmUfUmCfCmAfAmGmAmAmC | 669 |
| | | mU*mC*mU | |
| Modified | SS | mA*mG*mUmUmCmUmUmGfGfAfAmUmAmAmAmAmGmCmAmA | 667 |
| | | mU | |
| duplex 3 | AS | mA*fU*mUmGmCmUfUmUmUmAmUfUmCfCmAfAmGmAmAmC | 670 |
| | | mU*mC*mU | |
| Modified | SS | mA*mG*mUmUmCmUmUmGfGfAfAmUmAmAmAmAmGmCmAmA | 667 |
| | | mU | |
| duplex 4 | AS | mA*fU*mUmGfCmUmUfUmUmAmUfUmCfCmAfAmGmAmAmC | 671 |
| | | mU*mC*mU | |
| Modified | SS | mA*mG*mUmUmCmUfUmGfGfAfAmUmAmAmAmAmGmCmAmAm | 422 |
| | | U | |
| duplex 5 | AS | mA*fU*mUmGmCfUmUfUfUmAmUmUmCfCmAfAmGmAmAmCm | 430 |
| | | U*mC*mU | |
| Modified | SS | mA*mG*mUmUmCmUfUmGfGfAfAmUmAmAmAmAmGmCmAmAm | 672 |
| | | U | |
| duplex 6 | AS | mA*fU*mUmGmCfUmUmUmUmAmUmUmCfCmAfAmGmAmAmCm | 423 |
| | | U*mC*mU | |
| Modified | SS | mA*mG*mUmUmCmUmUmGfGfAfAmUmAmAmAmAmGmCmAmA | 667 |
| | | mU | |
| duplex 7 | AS | mA*fU*mUfGmCfUmUfUmUfAmUfUmCfCmAfAmGfAmAfCm | 673 |
| | | U*mC*mU | |
| Modified | SS | mA*mG*mUmUmCmUmUmGfGfAfAmUmAmAmAmAmGmCmAmA | 667 |
| | | mU | |
| duplex 8 | AS | mA*fU*mUmGmCmUfUmUmUmAmUmUmCfCmAfAmGmAmAmCm | 674 |
| | | U*mC*mU | |
| Modified | SS | mA*mG*mUmUmCmUmUmGfGfAfAmUmAmAmAmAmGmCmAmA | 667 |
| | | mU | |
| duplex 9 | AS | mA*fU*mUmGfCmUmUmUmUmAmUmUmCfCmAfAmGmAmAmCm | 675 |
| | | U*mC*mU | |
| Modified | SS | mA*mG*mUmUmCmUmUmGfGfAfAmUmAmAmAmAmGmCmAmA | 667 |
| | | mU | |
| duplex 10 | AS | mA*fU*fUmGfCmUmUmUmUmAmUfUmCfCmAfAmGmAmAmC | 676 |
| | | mU*mC*mU | |
| Modified | SS | mA*mG*mUmUmCmUmUmGfGfAfAmUmAmAmAmAmGmCmAmA | 667 |
| duplex 11 | | mU | |
| | AS | mA*fU*mUmGdCmUdTmUmUmAmUfUmCfCmAfAmGmAmAmC | 677 |
| | | mU*mC*mU | |
| Modified | SS | mA*mG*mUmUmCmUmUmGfGfAfAmUmAmAmAmAmGmCmAmA | 667 |
| | | mU | |
| duplex 12 | AS | mA*fU*mUmGdCmUmUmUmUmAmUfUmCfCmAfAmGmAmAmCm | 678 |
| | | U*mC*mU | |
| Modified | SS | mA*mG*mUmUmCmUmUmGfGfAfAmUmAmAmAmAmGmCmAmA | 667 |
| | | mU | |
| duplex 13 | AS | mA*fU*mUmGmCmUgnaTmUmUmAmUfUmCfCmAfAmGmAmAmC | 679 |
| | | mU*mC*mU | |
| Modified | SS | mA*mG*mUmUmCmUfUmGfGfAfAmUmAmAmAmAmGmCmAmAm | 672 |
| | | U | |
| duplex 14 | AS | mA*fU*mUmGfCmUmUmUmUmAmUfUmCfCmAfAmGmAmAmCm | 669 |
| | | U*mC*mU | |
| Modified | SS | mA*mG*mUmUmCmUfUmGfGfAfAmUfAmAmAmAmGmCmAmAm | 680 |
| | | U | |
| duplex 15 | AS | mA*fU*mUmGdCmUmUmUmUmAmUfUmCfCmAfAmGmAmAmCm | 678 |
| | | U*mC*mU | |
| Modified | SS | mA*mG*mUmUmCmUfUmGfGfAfAmUfAmAfAmAmGmCmAmAmU | 681 |
| duplex 16 | AS | mA*fU*mUmGdCmUmUmUmUmAmUfUmCfCmAfAmGmAmAmCm | 678 |
| | | U*mC*mU | |
| Modified | SS | mA*mG*mUmUmCmUmUfGfGfAfAmUmAmAmAmAmGmCmAmAm | 682 |
| | | U | |
| duplex 17 | AS | mA*fU*mUmGdCmUmUmUmUmAmUfUmCfCmAfAmGmAmAmCm | 678 |
| | | U*mC*mU | |
| Modified | SS | mA*mG*mUmUmCmUfUmGfGfAdAmUmAmAmAmAmGmCmAmAm | 683 |
| | | U | |
| duplex 18 | AS | mA*fU*mUmGfCmUmUmUmUmAmUfUmCfCmAfAmGmAmAmCm | 669 |
| | | U*mC*mU | |
| Modified | SS | mA*mG*mUmUmCmUfUmGfGfAdAmUmAmAmAmAmGmCmAmAm | 683 |
| | | U | |
| duplex 19 | AS | mA*fU*mUmGdCmUmUmUmUmAmUfUmCfCmAfAmGmAmAmCm | 678 |
| | | U*mC*mU | |
| Modified | SS | mA*mG*mUmUmCmUfUmGfGfAdAmUmAmAmAmAmGmCmAmAm | 683 |
| | | U | |
| duplex 20 | AS | mA*fU*mUmGdCmUdTmUmUmAmUmUmCfCmAfAmGmAmAmCm | 684 |
| | | U*mC*mU | |
| Modified | SS | mA*mG*mUmUfCmUfUmGfGfAfAmUfAmAmAmAmGmCmAmAmU | 685 |
| duplex 21 | AS | mA*fU*mUmGdCmUmUmUmUmAmUfUmCfCmAfAmGmAmAmCm | 678 |
| | | U*mC*mU | |

Specifically, uppercase C, G, U, and A represent the base composition of a nucleotide; lowercase d represents that the nucleotide immediately to the right of the letter d is a deoxyribonucleotide; lowercase m represents that the nucleotide immediately to the right of the letter m is a 2′-methoxy nucleotide; symbol f represents that the nucleotide immediately to the right of the symbol f is a 2-fluoro nucleotide; gn represents that the nucleotide immediately to the right of the symbol gn is a glycerol nucleotide (GNA); tn represents that the nucleotide immediately to the right of the symbol tn is a threose nucleotide (TNA); ml refers to inosine with a 2′-methoxy substitution on the ribose moiety; symbol * represents that the two adjacent nucleotides flanking the symbol * are linked via a phosphorothioate linkage.

### Example 2: In Vitro Activity Assay of ANGPTL4 siRNA—psiCHECK

[0142] Potential ANGPTL4 inhibitors of the present disclosure were synthesized by bioinformatics analysis to screen cross-reactive ANGPTL4 siRNA candidate sequences targeting both human and non-human primates. To screen for the target siRNA, the human ANGPTL4 cDNA sequence (NCBI Accession No. NM 139314.3) was cloned from a commercial available mammalian expression vector (OriGene, Rockville, MD) into a commercially available reporter-based screening plasmid, psiCHECK 2 (Promega, Madison, WI), which generated a Renilla luciferase/ANGPTL4 fusion mRNA. psiCHECK screening was performed in 293T cells (Nanjing Cobioer Biosciences) to assess siRNA activity. 293T cells were inoculated into a 96-well plate at 20,000 cells/well. The cells were co-transfected with the ANGPTL4 siRNA of the present disclosure at two concentrations, 50 ng ofANGPTL4-psiCHECK 2 plasmid per well and 0.3 μL of Lipofectamine 2000™ per well, respectively. After 24 hours of incubation at 37° C. with 5% CO₂, the Dual-Glo Luciferase Assay System (Promega, E2920) was used to perform a dual luciferase reporter assay for ANGPTL4 knockdown activity. 3 to 4 independent transfections were performed per duplex. Gene knockdown was determined by measuring Renilla luciferase levels normalized to constitutively expressed firefly luciferase levels (Tables 4 to 9). In Tables 4 to 9, “Average” represents the mean of the ratio of the ANGPTL4 expression in the detected sample to that in the control (without siRNA), and “SD” represents the standard deviation. PC a (an unmodified sequence of the EDT01162 molecule from published patent WO_2022261005), known to have an inhibitory effect on the ANGPTL4 gene, was used as a positive control in the activity assay of duplexes.

TABLE 4
Results of in vitro activity assay of duplexes

| | Relative Rluc-ANGPTL4 expression | | | | | Relative Rluc-ANGPTL4 expression | | | |
|---|---|---|---|---|---|---|---|---|---|
| Duplex | 1 nM | | 0.1 nM | | Duplex | 1 nM | | 0.1 nM | |
| No. | Average | SD | Average | SD | No. | Average | SD | Average | SD |
| 1 | 0.83 | 0.06 | 0.97 | 0.03 | 105 | 0.64 | 0.06 | 0.85 | 0.08 |
| 2 | 0.71 | 0.06 | 0.88 | 0.05 | 106 | 0.61 | 0.06 | 0.70 | 0.12 |
| 3 | 1.05 | 0.10 | 1.02 | 0.05 | 107 | 0.48 | 0.09 | 0.66 | 0.07 |
| 4 | 0.54 | 0.03 | 0.64 | 0.04 | 108 | 0.58 | 0.06 | 0.92 | 0.06 |
| 5 | 0.54 | 0.05 | 0.67 | 0.07 | 109 | 0.77 | 0.17 | 0.96 | 0.13 |
| 6 | 0.52 | 0.05 | 0.77 | 0.04 | 110 | 0.79 | 0.09 | 0.98 | 0.17 |
| 7 | 0.46 | 0.04 | 0.60 | 0.04 | 111 | 0.84 | 0.19 | 0.97 | 0.01 |
| 8 | 0.63 | 0.06 | 0.88 | 0.07 | 112 | 0.80 | 0.13 | 0.90 | 0.09 |
| 9 | 0.66 | 0.06 | 0.73 | 0.02 | 113 | 0.87 | 0.23 | 1.15 | 0.09 |
| 10 | 0.53 | 0.06 | 0.80 | 0.09 | 114 | 0.83 | 0.05 | 0.98 | 0.13 |
| 11 | 0.79 | 0.15 | 1.04 | 0.10 | 115 | 0.81 | 0.05 | 0.98 | 0.07 |
| 12 | 0.73 | 0.04 | 0.79 | 0.07 | 116 | 0.70 | 0.11 | 0.89 | 0.07 |
| 13 | 0.51 | 0.01 | 0.73 | 0.03 | 117 | 1.05 | 0.04 | 0.91 | 0.08 |
| 14 | 0.60 | 0.02 | 0.73 | 0.04 | 118 | 0.97 | 0.13 | 1.03 | 0.17 |
| 15 | 0.60 | 0.04 | 0.86 | 0.06 | 119 | 0.66 | 0.15 | 0.90 | 0.04 |
| 16 | 0.55 | 0.01 | 0.82 | 0.13 | 120 | 0.53 | 0.03 | 0.81 | 0.04 |
| 17 | 1.05 | 0.03 | 1.00 | 0.21 | 121 | 0.63 | 0.03 | 0.79 | 0.04 |
| 18 | 0.71 | 0.05 | 0.90 | 0.07 | 122 | 0.58 | 0.10 | 0.82 | 0.11 |
| 19 | 0.82 | 0.04 | 1.01 | 0.04 | 123 | 0.62 | 0.08 | 0.74 | 0.10 |
| 20 | 0.61 | 0.06 | 0.79 | 0.05 | 124 | 0.81 | 0.08 | 0.92 | 0.07 |
| 21 | 0.85 | 0.11 | 1.00 | 0.16 | 125 | 0.55 | 0.19 | 0.57 | 0.09 |
| 22 | 0.76 | 0.05 | 0.88 | 0.05 | 126 | 0.48 | 0.05 | 0.76 | 0.04 |
| 23 | 0.35 | 0.09 | 0.59 | 0.06 | 127 | 0.67 | 0.06 | 0.81 | 0.10 |
| 24 | 0.59 | 0.04 | 0.79 | 0.06 | 128 | 0.73 | 0.07 | 0.86 | 0.09 |
| 25 | 0.57 | 0.09 | 0.81 | 0.06 | 129 | 0.87 | 0.09 | 1.09 | 0.12 |
| 26 | 0.60 | 0.02 | 0.79 | 0.07 | 130 | 0.62 | 0.08 | 0.84 | 0.11 |
| 27 | 0.84 | 0.05 | 0.79 | 0.02 | 131 | 0.36 | 0.14 | 0.56 | 0.08 |
| 28 | 0.69 | 0.05 | 0.86 | 0.09 | 132 | 0.42 | 0.09 | 0.75 | 0.05 |
| 29 | 0.36 | 0.07 | 0.56 | 0.11 | 133 | 0.35 | 0.09 | 0.73 | 0.16 |
| 30 | 0.78 | 0.05 | 0.93 | 0.08 | 134 | 0.67 | 0.10 | 0.79 | 0.06 |
| 31 | 0.75 | 0.05 | 0.88 | 0.05 | 135 | 0.65 | 0.03 | 1.05 | 0.15 |
| 32 | 0.68 | 0.02 | 0.87 | 0.12 | 136 | 0.74 | 0.14 | 0.90 | 0.06 |
| 33 | 0.33 | 0.06 | 0.47 | 0.07 | 137 | 0.76 | 0.05 | 0.93 | 0.07 |
| 34 | 0.38 | 0.01 | 0.61 | 0.04 | 138 | 0.85 | 0.14 | 0.84 | 0.11 |
| 35 | 0.50 | 0.07 | 0.66 | 0.10 | 139 | 0.62 | 0.10 | 0.86 | 0.04 |
| 36 | 0.74 | 0.09 | 1.00 | 0.06 | 140 | 0.38 | 0.15 | 0.57 | 0.18 |
| 37 | 0.37 | 0.03 | 0.52 | 0.08 | 141 | 0.54 | 0.04 | 0.57 | 0.06 |
| 38 | 0.59 | 0.05 | 0.85 | 0.07 | 142 | 0.55 | 0.09 | 0.79 | 0.03 |
| 39 | 0.38 | 0.10 | 0.71 | 0.14 | 143 | 0.25 | 0.06 | 0.33 | 0.01 |
| 40 | 1.08 | 0.02 | 0.99 | 0.02 | 144 | 0.21 | 0.05 | 0.35 | 0.05 |
| 41 | 0.61 | 0.06 | 0.75 | 0.06 | 145 | 0.38 | 0.09 | 0.63 | 0.09 |
| 42 | 0.60 | 0.04 | 0.79 | 0.05 | 146 | 0.29 | 0.04 | 0.37 | 0.07 |
| 43 | 0.45 | 0.03 | 0.63 | 0.02 | 147 | 0.27 | 0.03 | 0.44 | 0.08 |
| 44 | 0.95 | 0.11 | 1.03 | 0.05 | 148 | 0.19 | 0.08 | 0.32 | 0.10 |
| 45 | 0.57 | 0.03 | 0.73 | 0.04 | 149 | 0.22 | 0.08 | 0.25 | 0.05 |
| 46 | 0.58 | 0.06 | 0.79 | 0.12 | 150 | 0.64 | 0.06 | 0.69 | 0.05 |
| 47 | 0.45 | 0.03 | 0.61 | 0.03 | 151 | 0.44 | 0.03 | 0.64 | 0.20 |
| 48 | 0.66 | 0.10 | 0.66 | 0.03 | 152 | 0.65 | 0.15 | 0.75 | 0.11 |
| 49 | 0.54 | 0.02 | 0.94 | 0.14 | 153 | 0.41 | 0.02 | 0.69 | 0.11 |
| 50 | 0.68 | 0.07 | 0.80 | 0.03 | 154 | 0.55 | 0.13 | 0.66 | 0.10 |
| 51 | 1.13 | 0.11 | 1.15 | 0.20 | 155 | 0.54 | 0.08 | 0.75 | 0.07 |
| 52 | 1.02 | 0.24 | 1.15 | 0.18 | 156 | 0.76 | 0.09 | 0.89 | 0.09 |
| 53 | 0.40 | 0.03 | 0.59 | 0.03 | 157 | 0.49 | 0.08 | 0.64 | 0.07 |
| 54 | 0.89 | 0.06 | 0.99 | 0.05 | 158 | 0.61 | 0.18 | 0.83 | 0.16 |
| 55 | 0.87 | 0.07 | 0.96 | 0.08 | 159 | 0.86 | 0.11 | 1.11 | 0.04 |
| 56 | 0.94 | 0.11 | 0.99 | 0.10 | 160 | 0.43 | 0.08 | 0.56 | 0.13 |
| 57 | 0.42 | 0.07 | 0.59 | 0.06 | 161 | 0.63 | 0.06 | 0.81 | 0.11 |
| 58 | 0.64 | 0.06 | 0.88 | 0.11 | 162 | 0.53 | 0.02 | 0.84 | 0.12 |
| 59 | 0.42 | 0.06 | 0.61 | 0.09 | 163 | 0.61 | 0.08 | 0.73 | 0.09 |
| 60 | 0.45 | 0.05 | 0.56 | 0.04 | 164 | 0.50 | 0.11 | 0.68 | 0.11 |
| 61 | 0.82 | 0.06 | 1.09 | 0.10 | 165 | 0.54 | 0.05 | 0.63 | 0.08 |
| 62 | 0.64 | 0.04 | 0.82 | 0.06 | 166 | 0.53 | 0.06 | 0.65 | 0.06 |
| 63 | 0.72 | 0.04 | 0.83 | 0.03 | 167 | 0.49 | 0.03 | 0.64 | 0.03 |
| 64 | 0.63 | 0.04 | 0.80 | 0.07 | 168 | 0.53 | 0.07 | 0.70 | 0.07 |
| 65 | 0.41 | 0.05 | 0.71 | 0.11 | 169 | 0.48 | 0.02 | 0.78 | 0.02 |
| 66 | 0.83 | 0.03 | 0.99 | 0.03 | 170 | 0.93 | 0.04 | 0.94 | 0.10 |
| 67 | 0.36 | 0.06 | 0.70 | 0.15 | 171 | 0.72 | 0.04 | 0.86 | 0.11 |
| 68 | 1.00 | 0.06 | 1.09 | 0.19 | 172 | 0.73 | 0.06 | 0.75 | 0.07 |
| 69 | 0.79 | 0.07 | 0.99 | 0.06 | 173 | 0.87 | 0.14 | 0.83 | 0.05 |
| 70 | 0.89 | 0.02 | 1.08 | 0.02 | 174 | 0.94 | 0.07 | 1.16 | 0.14 |
| 71 | 0.64 | 0.04 | 0.82 | 0.03 | 175 | 0.72 | 0.10 | 0.86 | 0.03 |
| 72 | 0.55 | 0.09 | 0.72 | 0.10 | 176 | 0.67 | 0.09 | 0.86 | 0.05 |
| 73 | 0.59 | 0.04 | 0.81 | 0.03 | 177 | 0.38 | 0.03 | 0.58 | 0.09 |
| 74 | 0.36 | 0.08 | 0.57 | 0.08 | 178 | 0.87 | 0.07 | 0.98 | 0.15 |
| 75 | 0.63 | 0.04 | 0.78 | 0.04 | 179 | 0.49 | 0.05 | 0.54 | 0.06 |
| 76 | 0.60 | 0.08 | 0.87 | 0.08 | 180 | 0.57 | 0.06 | 0.65 | 0.06 |
| 77 | 0.55 | 0.02 | 0.76 | 0.04 | 181 | 0.48 | 0.06 | 0.62 | 0.05 |
| 78 | 0.39 | 0.05 | 0.51 | 0.02 | 182 | 0.64 | 0.11 | 0.65 | 0.08 |
| 79 | 0.54 | 0.03 | 0.79 | 0.04 | 183 | 0.56 | 0.03 | 0.65 | 0.02 |
| 80 | 0.49 | 0.06 | 0.59 | 0.08 | 184 | 0.57 | 0.08 | 0.71 | 0.09 |
| 81 | 0.46 | 0.03 | 0.72 | 0.02 | 185 | 0.47 | 0.03 | 0.65 | 0.08 |
| 82 | 0.76 | 0.06 | 0.81 | 0.11 | 186 | 0.44 | 0.06 | 0.60 | 0.07 |
| 83 | 0.52 | 0.02 | 0.80 | 0.04 | 187 | 0.39 | 0.07 | 0.43 | 0.04 |
| 84 | 0.50 | 0.04 | 0.69 | 0.00 | 188 | 0.37 | 0.02 | 0.45 | 0.05 |
| 85 | 0.59 | 0.22 | 1.05 | 0.08 | 189 | 0.64 | 0.31 | 0.80 | 0.05 |
| 86 | 0.60 | 0.03 | 0.76 | 0.06 | 190 | 0.54 | 0.30 | 0.52 | 0.07 |
| 87 | 0.54 | 0.10 | 0.76 | 0.21 | 191 | 0.74 | 0.07 | 0.84 | 0.07 |
| 88 | 0.68 | 0.07 | 0.79 | 0.16 | 192 | 0.92 | 0.04 | 0.90 | 0.08 |
| 89 | 0.76 | 0.10 | 0.93 | 0.12 | 193 | 0.92 | 0.06 | 1.01 | 0.06 |
| 90 | 0.66 | 0.21 | 0.73 | 0.05 | 194 | 0.49 | 0.03 | 0.82 | 0.13 |
| 91 | 0.74 | 0.10 | 0.91 | 0.08 | 195 | 0.50 | 0.03 | 0.91 | 0.11 |
| 92 | 0.69 | 0.09 | 0.77 | 0.15 | 196 | 0.43 | 0.05 | 0.71 | 0.11 |
| 93 | 0.89 | 0.08 | 0.89 | 0.10 | 197 | 0.70 | 0.08 | 0.93 | 0.05 |
| 94 | 0.50 | 0.06 | 0.86 | 0.04 | 198 | 0.63 | 0.03 | 0.89 | 0.05 |
| 95 | 0.57 | 0.15 | 0.89 | 0.23 | 199 | 0.69 | 0.05 | 0.81 | 0.03 |
| 96 | 0.51 | 0.14 | 0.88 | 0.21 | 200 | 0.84 | 0.04 | 0.84 | 0.07 |
| 97 | 0.63 | 0.08 | 0.71 | 0.09 | 201 | 0.67 | 0.05 | 0.93 | 0.07 |
| 98 | 0.90 | 0.15 | 1.02 | 0.17 | 202 | 0.68 | 0.04 | 0.84 | 0.10 |
| 99 | 1.03 | 0.30 | 1.04 | 0.18 | 203 | 0.59 | 0.11 | 0.81 | 0.03 |
| 100 | 0.87 | 0.13 | 1.25 | 0.21 | 204 | 0.65 | 0.09 | 0.87 | 0.10 |
| 101 | 0.83 | 0.05 | 0.94 | 0.08 | 205 | 0.48 | 0.03 | 0.68 | 0.11 |
| 102 | 0.63 | 0.08 | 0.94 | 0.20 | 206 | 0.40 | 0.09 | 0.52 | 0.06 |
| 103 | 0.55 | 0.11 | 0.73 | 0.14 | 207 | 0.44 | 0.02 | 0.49 | 0.03 |
| 104 | 0.54 | 0.05 | 0.72 | 0.12 | 208 | 0.34 | 0.05 | 0.38 | 0.06 |
| PC a | 0.31 | 0.03 | 0.36 | 0.12 | | | | | |

TABLE 5
Results of in vitro activity assay of duplexes

| Relative Rluc-ANGPTL4 expression | |
|---|---|
| 0.5 nM | 0.05 nM |

| Duplex No. | Average | SD | Average | SD |
|---|---|---|---|---|
| 143 | 0.215 | 0.023 | 0.309 | 0.028 |
| 212 | 0.337 | 0.031 | 0.547 | 0.034 |
| 213 | 0.177 | 0.018 | 0.300 | 0.047 |
| 214 | 0.199 | 0.034 | 0.380 | 0.037 |
| 215 | 0.326 | 0.039 | 0.603 | 0.045 |
| 217 | 0.277 | 0.044 | 0.460 | 0.030 |

TABLE 6
Results of in vitro activity assay of conjugates

| | Relative Rluc-ANGPTL4 expression | | | | | Relative Rluc-ANGPTL4 expression | | | |
|---|---|---|---|---|---|---|---|---|---|
| Conjugate | 1 nM | | 0.1 nM | | Conjugate | 1 nM | | 0.1 nM | |
| No. | Average | SD | Average | SD | No. | Average | SD | Average | SD |
| 1 | 0.18 | 0.03 | 0.19 | 0.03 | 25 | 0.17 | 0.05 | 0.33 | 0.04 |
| 2 | 0.17 | 0.03 | 0.50 | 0.04 | 26 | 0.18 | 0.04 | 0.38 | 0.04 |
| 3 | 0.17 | 0.06 | 0.44 | 0.12 | 30 | 0.17 | 0.03 | 0.22 | 0.05 |
| 4 | 0.16 | 0.04 | 0.51 | 0.05 | 31 | 0.15 | 0.02 | 0.33 | 0.04 |
| 5 | 0.16 | 0.03 | 0.22 | 0.05 | 29 | 0.22 | 0.06 | 0.29 | 0.04 |
| 6 | 0.26 | 0.05 | 0.65 | 0.15 | 32 | 0.15 | 0.03 | 0.22 | 0.05 |
| 7 | 0.25 | 0.03 | 0.46 | 0.07 | 33 | 0.17 | 0.01 | 0.21 | 0.03 |
| 8 | 0.25 | 0.05 | 0.50 | 0.09 | 34 | 0.19 | 0.03 | 0.29 | 0.05 |
| 9 | 0.24 | 0.06 | 0.41 | 0.09 | 35 | 0.17 | 0.03 | 0.20 | 0.03 |
| 11 | 0.25 | 0.07 | 0.50 | 0.13 | 36 | 0.21 | 0.07 | 0.31 | 0.06 |
| 10 | 0.27 | 0.07 | 0.51 | 0.04 | 42 | 0.21 | 0.05 | 0.48 | 0.10 |
| 12 | 0.36 | 0.04 | 0.73 | 0.05 | 43 | 0.24 | 0.04 | 0.54 | 0.03 |
| 13 | 0.18 | 0.07 | 0.24 | 0.09 | 44 | 0.21 | 0.04 | 0.43 | 0.04 |
| 19 | 0.15 | 0.03 | 0.17 | 0.07 | 45 | 0.22 | 0.04 | 0.52 | 0.01 |
| 17 | 0.14 | 0.04 | 0.23 | 0.06 | 46 | 0.24 | 0.03 | 0.52 | 0.07 |
| 23 | 0.12 | 0.03 | 0.22 | 0.04 | 37 | 0.29 | 0.03 | 0.44 | 0.05 |
| 14 | 0.23 | 0.03 | 0.32 | 0.07 | 38 | 0.28 | 0.05 | 0.50 | 0.03 |
| 20 | 0.18 | 0.02 | 0.26 | 0.03 | 39 | 0.30 | 0.05 | 0.56 | 0.05 |
| 15 | 0.13 | 0.05 | 0.25 | 0.05 | 40 | 0.26 | 0.08 | 0.53 | 0.02 |
| 21 | 0.14 | 0.04 | 0.19 | 0.03 | 41 | 0.31 | 0.04 | 0.61 | 0.12 |
| 18 | 0.19 | 0.03 | 0.26 | 0.05 | 47 | 0.20 | 0.03 | 0.33 | 0.07 |
| 24 | 0.19 | 0.06 | 0.16 | 0.06 | 48 | 0.21 | 0.05 | 0.39 | 0.10 |
| 16 | 0.15 | 0.04 | 0.26 | 0.05 | 49 | 0.24 | 0.02 | 0.54 | 0.08 |
| 22 | 0.16 | 0.04 | 0.23 | 0.02 | 50 | 0.18 | 0.03 | 0.30 | 0.05 |
| 27 | 0.19 | 0.07 | 0.19 | 0.06 | 51 | 0.19 | 0.05 | 0.41 | 0.04 |
| 28 | 0.16 | 0.04 | 0.24 | 0.07 | 52 | 0.26 | 0.05 | 0.54 | 0.08 |

TABLE 7
Results of in vitro activity assay of conjugates

| | Relative Rluc-ANGPTL4 expression | | | | | Relative Rluc-ANGPTL4 expression | | | |
|---|---|---|---|---|---|---|---|---|---|
| Conjugate | 1 nM | | 0.1 nM | | Conjugate | 1 nM | | 0.1 nM | |
| No. | Average | SD | Average | SD | No. | Average | SD | Average | SD |
| 5 | 0.17 | 0.05 | 0.22 | 0.07 | 74 | 0.17 | 0.02 | 0.28 | 0.03 |
| 54 | 0.20 | 0.04 | 0.31 | 0.04 | 77 | 0.12 | 0.03 | 0.19 | 0.03 |
| 60 | 0.17 | 0.04 | 0.22 | 0.03 | 83 | 0.12 | 0.04 | 0.23 | 0.02 |
| 57 | 0.18 | 0.03 | 0.26 | 0.06 | 80 | 0.12 | 0.03 | 0.20 | 0.03 |
| 63 | 0.17 | 0.05 | 0.20 | 0.04 | 32 | 0.17 | 0.02 | 0.28 | 0.04 |
| 69 | 0.17 | 0.03 | 0.20 | 0.05 | 55 | 0.18 | 0.04 | 0.27 | 0.04 |
| 94 | 0.12 | 0.07 | 0.20 | 0.04 | 61 | 0.19 | 0.04 | 0.29 | 0.06 |
| 91 | 0.17 | 0.03 | 0.33 | 0.05 | 58 | 0.17 | 0.06 | 0.20 | 0.03 |
| 87 | 0.18 | 0.05 | 0.24 | 0.04 | 64 | 0.15 | 0.05 | 0.21 | 0.05 |
| 75 | 0.29 | 0.05 | 0.35 | 0.05 | 70 | 0.14 | 0.01 | 0.29 | 0.04 |
| 78 | 0.19 | 0.05 | 0.24 | 0.06 | 92 | 0.13 | 0.02 | 0.16 | 0.01 |
| 81 | 0.15 | 0.02 | 0.23 | 0.01 | 25 | 0.16 | 0.03 | 0.23 | 0.02 |
| 84 | 0.22 | 0.05 | 0.30 | 0.07 | 73 | 0.15 | 0.02 | 0.30 | 0.03 |
| 93 | 0.15 | 0.04 | 0.13 | 0.02 | 88 | 0.13 | 0.04 | 0.25 | 0.04 |
| 23 | 0.11 | 0.04 | 0.16 | 0.05 | 76 | 0.13 | 0.02 | 0.32 | 0.10 |
| 19 | 0.14 | 0.03 | 0.16 | 0.05 | 85 | 0.17 | 0.03 | 0.23 | 0.04 |
| 53 | 0.16 | 0.02 | 0.23 | 0.04 | 82 | 0.14 | 0.04 | 0.25 | 0.03 |
| 59 | 0.21 | 0.02 | 0.21 | 0.05 | 79 | 0.15 | 0.00 | 0.26 | 0.08 |
| 56 | 0.16 | 0.04 | 0.26 | 0.04 | 27 | 0.12 | 0.05 | 0.22 | 0.04 |
| 68 | 0.13 | 0.03 | 0.24 | 0.05 | 89 | 0.64 | 0.03 | 0.89 | 0.04 |
| 1 | 0.13 | 0.02 | 0.20 | 0.07 | 42 | 0.24 | 0.02 | 0.43 | 0.06 |
| 90 | 0.15 | 0.02 | 0.21 | 0.04 | 95 | 0.50 | 0.03 | 0.80 | 0.11 |
| 86 | 0.12 | 0.03 | 0.26 | 0.02 | | | | | |

TABLE 8
Results of in vitro activity assay of conjugates

| | Relative Rluc-ANGPTL4 expression | | | | | Relative Rluc-ANGPTL4 expression | | | |
|---|---|---|---|---|---|---|---|---|---|
| Conjugate | 0.5 nM | | 0.05 nM | | Conjugate | 0.5 nM | | 0.05 nM | |
| No. | Average | SD | Average | SD | No. | Average | SD | Average | SD |
| 1 | 0.15 | 0.03 | 0.34 | 0.05 | 134 | 0.15 | 0.03 | 0.25 | 0.01 |
| 90 | 0.14 | 0.02 | 0.39 | 0.08 | 123 | 0.22 | 0.02 | 0.29 | 0.04 |
| 71 | 0.19 | 0.02 | 0.43 | 0.03 | 124 | 0.24 | 0.03 | 0.32 | 0.07 |
| 62 | 0.18 | 0.02 | 0.35 | 0.02 | 125 | 0.39 | 0.04 | 0.41 | 0.06 |
| 65 | 0.15 | 0.02 | 0.30 | 0.04 | 126 | 0.26 | 0.01 | 0.34 | 0.05 |
| 101 | 0.15 | 0.03 | 0.44 | 0.04 | 127 | 0.22 | 0.02 | 0.28 | 0.02 |
| 102 | 0.17 | 0.03 | 0.41 | 0.05 | 128 | 0.17 | 0.02 | 0.29 | 0.04 |
| 103 | 0.19 | 0.02 | 0.39 | 0.05 | 129 | 0.24 | 0.05 | 0.40 | 0.02 |
| 104 | 0.15 | 0.02 | 0.43 | 0.05 | 93 | 0.19 | 0.04 | 0.42 | 0.06 |
| 93 | 0.14 | 0.02 | 0.28 | 0.05 | 229 | 0.13 | 0.03 | 0.19 | 0.04 |
| 130 | 0.13 | 0.03 | 0.29 | 0.02 | 230 | 0.11 | 0.05 | 0.23 | 0.07 |
| 23 | 0.14 | 0.02 | 0.25 | 0.04 | 231 | 0.15 | 0.05 | 0.26 | 0.06 |
| 132 | 0.13 | 0.02 | 0.26 | 0.01 | 77 | 0.17 | 0.02 | 0.36 | 0.04 |
| 19 | 0.16 | 0.01 | 0.28 | 0.03 | 232 | 0.11 | 0.02 | 0.26 | 0.07 |
| 133 | 0.13 | 0.02 | 0.28 | 0.03 | 80 | 0.11 | 0.05 | 0.29 | 0.04 |
| 5 | 0.17 | 0.02 | 0.30 | 0.03 | 233 | 0.12 | 0.03 | 0.28 | 0.04 |
| 72 | 0.20 | 0.03 | 0.52 | 0.03 | 234 | 0.10 | 0.01 | 0.27 | 0.07 |
| 66 | 0.18 | 0.03 | 0.41 | 0.03 | 235 | 0.12 | 0.02 | 0.23 | 0.01 |
| 94 | 0.15 | 0.01 | 0.28 | 0.02 | 32 | 0.13 | 0.04 | 0.34 | 0.05 |
| 131 | 0.15 | 0.02 | 0.28 | 0.04 | 67 | 0.12 | 0.01 | 0.39 | 0.07 |
| 32 | 0.18 | 0.02 | 0.37 | 0.04 | 92 | 0.11 | 0.03 | 0.19 | 0.02 |
| 67 | 0.18 | 0.02 | 0.39 | 0.01 | 64 | 0.13 | 0.04 | 0.34 | 0.04 |
| 112 | 0.22 | 0.02 | 0.64 | 0.10 | 236 | 0.16 | 0.03 | 0.43 | 0.02 |
| 113 | 0.23 | 0.04 | 0.67 | 0.05 | 92 | 0.13 | 0.01 | 0.21 | 0.04 |
| 114 | 0.21 | 0.02 | 0.65 | 0.03 | 237 | 0.12 | 0.04 | 0.19 | 0.05 |
| 50 | 0.20 | 0.03 | 0.49 | 0.05 | 238 | 0.10 | 0.03 | 0.22 | 0.04 |
| 134 | 0.15 | 0.03 | 0.25 | 0.01 | 239 | 0.15 | 0.05 | 0.22 | 0.02 |
| 107 | 0.15 | 0.01 | 0.45 | 0.03 | 26 | 0.18 | 0.05 | 0.56 | 0.06 |
| 106 | 0.16 | 0.02 | 0.36 | 0.05 | 240 | 0.15 | 0.01 | 0.23 | 0.03 |
| 105 | 0.16 | 0.04 | 0.39 | 0.03 | 241 | 0.10 | 0.04 | 0.22 | 0.05 |
| 108 | 0.16 | 0.02 | 0.35 | 0.08 | 242 | 0.14 | 0.02 | 0.30 | 0.02 |
| 109 | 0.16 | 0.02 | 0.17 | 0.04 | 225 | 0.13 | 0.02 | 0.27 | 0.03 |
| 110 | 0.17 | 0.02 | 0.44 | 0.04 | 127 | 0.22 | 0.02 | 0.28 | 0.02 |
| 111 | 0.12 | 0.04 | 0.25 | 0.02 | 128 | 0.17 | 0.02 | 0.29 | 0.04 |
| 50 | 0.23 | 0.03 | 0.55 | 0.07 | 129 | 0.24 | 0.05 | 0.40 | 0.02 |
| 123 | 0.22 | 0.02 | 0.29 | 0.04 | 109 | 0.16 | 0.02 | 0.17 | 0.04 |
| 124 | 0.24 | 0.03 | 0.32 | 0.07 | 111 | 0.12 | 0.04 | 0.25 | 0.02 |
| 125 | 0.39 | 0.04 | 0.41 | 0.06 | 119 | 0.15 | 0.03 | 0.33 | 0.03 |
| 126 | 0.26 | 0.01 | 0.34 | 0.05 | 120 | 0.18 | 0.05 | 0.19 | 0.07 |

TABLE 9
Results of in vitro activity assay of modified duplexes

| | Relative Rluc-ANGPTL4 expression | | | |
|---|---|---|---|---|
| | 0.5 nM | | 0.05 nM | |
| Modified duplex No. | Average | SD | Average | SD |
| 1 | 0.132 | 0.041 | 0.233 | 0.044 |
| 2 | 0.129 | 0.019 | 0.203 | 0.020 |
| 3 | 0.181 | 0.027 | 0.301 | 0.030 |
| 4 | 0.137 | 0.004 | 0.223 | 0.038 |
| 5 | 0.157 | 0.029 | 0.277 | 0.025 |
| 6 | 0.167 | 0.010 | 0.240 | 0.027 |
| 7 | 0.164 | 0.014 | 0.317 | 0.032 |
| 8 | 0.205 | 0.021 | 0.258 | 0.041 |
| 9 | 0.162 | 0.021 | 0.213 | 0.029 |
| 10 | 0.142 | 0.024 | 0.179 | 0.039 |
| 11 | 0.151 | 0.020 | 0.256 | 0.024 |
| 12 | 0.149 | 0.037 | 0.241 | 0.014 |
| 13 | 0.198 | 0.025 | 0.352 | 0.021 |
| 14 | 0.142 | 0.029 | 0.217 | 0.020 |
| 15 | 0.158 | 0.010 | 0.266 | 0.044 |
| 16 | 0.144 | 0.009 | 0.256 | 0.012 |
| 17 | 0.156 | 0.043 | 0.213 | 0.022 |
| 18 | 0.153 | 0.011 | 0.225 | 0.035 |
| 19 | 0.156 | 0.008 | 0.265 | 0.028 |
| 20 | 0.155 | 0.009 | 0.230 | 0.035 |
| 21 | 0.176 | 0.023 | 0.231 | 0.027 |

[0143] The experimental results demonstrated that the siRNA duplexes, siRNA conjugates, and siRNA modified duplexes of the present disclosure exhibited good in vitro inhibitory activity against ANGPTL4 gene expression.

### Example 3: In Vitro Activity Assay of ANGPTL4 RNAi—U138-MG Cell Transfection

[0144] U138-MG cells (ATCC) were inoculated into a 24-well plate at 40,000 cells/well and incubated for 16 hours at 37° C. with 5% CO₂ before transfection. The cells were co-transfected with siRNA and Lipofectamine RNAiMAX (Invitrogen). After 24 hours of incubation at 37° C. with 5% CO₂, RNA was extracted using the MolPure Magnetic Tissue/Cell Total RNA Kit (Yeasen, Cat #18600ES60). cDNA synthesis was performed using the gDNA Removal and cDNA Synthesis Kit (TransGen Biotech Co., Ltd., Beijing, China; Cat # AE311-03). Real-time fluorescence PCR was performed using the AACt method on the ABI QuantStudio™ 6 Real-Time PCR System. 3 to 4 independent transfections were performed per duplex or conjugate, with each transfection performed in 3 to 4 replicates (Tables 10 to 11). PC c (EDT01162 from published patent WO_2022261005), known to have an inhibitory effect on the ANGPTL4 gene, as well as PC a, an unmodified sequence of the molecule, were used as positive controls.

TABLE 10
Results of IC₅₀ assay of duplexes

| Duplex No. | IC₅₀ (pM) |
|---|---|
| 143 | 9.68 |
| 144 | 77.58 |
| 146 | 15.90 |
| 147 | 17.92 |
| 148 | 22.98 |
| 149 | 11.97 |
| PC a | 10.14 |

TABLE 11
Results of IC₅₀ assay of conjugates

| Conjugate No. | IC₅₀ (pM) |
|---|---|
| PC c | 31.44 |
| 1 | 6.51 |
| 16 | 12.16 |
| 17 | 17.33 |
| 19 | 1.32 |
| 21 | 7.94 |
| 23 | 3.87 |
| 22 | 13.11 |
| 120 | 7.21 |
| 5 | 33.33 |

[0145] The experimental results demonstrated that the siRNA duplexes or siRNA conjugates of the present disclosure exhibited excellent inhibitory activity against ANGPTL4 gene expression in U138-MG cells.

### Example 4: In Vitro Activity Assay of ANGPTL4 RNAi—Free Uptake in Human and Cynomolgus Monkey Primary Hepatocytes

[0146] After thawing, human and cynomolgus monkey primary hepatocytes were diluted in culture medium to a density of 600,000 cells/mL. Different concentrations of conjugates were added to a 96-well collagen-coated plate at 10 μL/well, followed by the addition of 90 μL/well of human or cynomolgus monkey primary hepatocytes (54,000 cells/well). A PBS control group was also included. After seeding, the plate was incubated at 37° C. with 5% CO₂ for 48 hours. After 48 hours, the culture medium was removed, and the cells were collected for RNA extraction. Total RNA was extracted using the RNeasy 96 Kit (QIAGEN, Cat #74182) according to the instructions. Subsequently, cDNA was synthesized using HiScript III RT SuperMix for qPCR (+gDNA wiper) (Vazyme, Cat #R323-01) according to the instructions. Real-time fluorescence PCR was performed using the AACt method on the Applied Biosystems QuantStudio 7 Flex Real-Time PCR System (Tables 12 to 13). PC c, known to have an inhibitory effect on the ANGPTL4 gene, was used as a positive control.

TABLE 12
Results of free uptake assay in human primary hepatocytes

| | Free uptake in human primary hepatocytes | | | | | |
|---|---|---|---|---|---|---|
| | 30 nM | | 3 nM | | 0.3 nM | |
| | Average | | Average | | Average | |
| Conjugate | mRNA | | mRNA | | mRNA | |
| No. | remaining | SD | remaining | SD | remaining | SD |
| PC c | 0.11 | 0.02 | 0.22 | 0.02 | 0.58 | 0.05 |
| 1 | 0.13 | 0.01 | 0.26 | 0.01 | 0.58 | 0.05 |
| 17 | 0.13 | 0.04 | 0.25 | 0.01 | 0.64 | 0.06 |
| 23 | 0.12 | 0.02 | 0.25 | 0.01 | 0.61 | 0.02 |
| 19 | 0.11 | 0.02 | 0.25 | 0.01 | 0.58 | 0.04 |
| 28 | 0.17 | 0.02 | 0.35 | 0.02 | 0.68 | 0.03 |
| 16 | 0.12 | 0.01 | 0.26 | 0.02 | 0.62 | 0.06 |
| 22 | 0.13 | 0.01 | 0.32 | 0.01 | 0.69 | 0.02 |
| 15 | 0.14 | 0.02 | 0.33 | 0.01 | 0.80 | 0.05 |
| 21 | 0.13 | 0.02 | 0.27 | 0.01 | 0.71 | 0.02 |
| 93 | NA | NA | 0.29 | 0.07 | 0.81 | 0.07 |
| 227 | NA | NA | 0.26 | 0.04 | 0.76 | 0.02 |
| 133 | NA | NA | 0.32 | 0.07 | 0.89 | 0.01 |
| 92 | NA | NA | 0.26 | 0.02 | 0.53 | 0.08 |
| 234 | NA | NA | 0.31 | 0.01 | 0.61 | 0.13 |
| 235 | NA | NA | 0.35 | 0.02 | 0.68 | 0.14 |
| 236 | NA | NA | 0.30 | 0.04 | 0.61 | 0.12 |
| 238 | NA | NA | 0.28 | 0.03 | 0.65 | 0.06 |
| 225 | NA | NA | 0.74 | 0.07 | 0.93 | 0.14 |
| 120 | NA | NA | 0.37 | 0.03 | 0.73 | 0.13 |

Note:
NA indicates not applicable

TABLE 13
Free uptake assay in cynomolgus monkey primary hepatocytes

| | Free uptake in monkey primary hepatocytes | | | | | |
|---|---|---|---|---|---|---|
| | 30 nM | | 10 nM | | 3 nM | |
| | Average | | Average | | Average | |
| Conjugate | mRNA | | mRNA | | mRNA | |
| No. | remaining | SD | remaining | SD | remaining | SD |
| PC c | 0.35 | 0.08 | 0.39 | 0.16 | 0.53 | 0.08 |
| 5 | 0.39 | 0.13 | 0.41 | 0.07 | 0.43 | 0.08 |
| 1 | 0.23 | 0.01 | 0.41 | 0.16 | 0.54 | 0.15 |
| 17 | 0.34 | 0.15 | 0.45 | 0.04 | 0.57 | 0.06 |
| 23 | 0.36 | 0.07 | 0.53 | 0.08 | 0.65 | 0.32 |
| 19 | 0.35 | 0.03 | 0.40 | 0.04 | 0.78 | 0.24 |
| 16 | 0.29 | 0.09 | 0.43 | 0.09 | 0.56 | 0.07 |

[0147] The experimental results demonstrated that the tested conjugates in Table 12 exhibited excellent inhibitory activity against ANGPTL4 gene expression in human primary hepatocytes, while the tested conjugates in Table 13 exhibited excellent inhibitory activity against ANGPTL4 gene expression in cynomolgus monkey primary hepatocytes. Notably, all tested molecules showed a significant inhibitory effect on ANGPTL4 mRNA in both human and monkey primary hepatocytes, with most demonstrating comparable inhibitory activity to the control molecule PC c.

### Example 5: Immunogenicity Assay of ANGPTL4 RNAi

[0148] siRNA and control compounds polyIC (MCE, HY-107202) and naked siRNA (i.e., unmodified RNA molecules conventionally used as controls in the art) were transfected into freshly isolated and pooled human PBMCs according to the instructions of Lipofectamine® 3000 Transfection Kit (Thermo, L3000-015), with a final cell density of 20,000 cells/well in a plate. After 24 hours of incubation at 37° C. with 500 CO₂, cell supernatants were collected to measure IFN alpha, IL-6, and TNF alpha levels (Cytokine Kit, Thermo, PPX-03-MXU64WY). The fold change in cytokine levels relative to control wells for each siRNA was calculated to evaluate the induction of different cytokines by siRNA in human PBMCs (Table 14).

[0149] The experimental results demonstrated that the controls polyIC, naked siRNA, and GS9688 (CAS: 2004677-13-6) exhibited the expected induction of the three cytokines IFN alpha, IL-6, and TNF alpha at test concentrations.

[0150] For IFN alpha, conjugates 130, 133, and 225 exhibited no significant induction (a fold change less than 3) at transfection concentrations of 100 nM and 10 nM, outperforming conjugate PC c. For IL-6, conjugates 130 and 225 exhibited no significant induction at transfection concentrations of 100 nM and 10 nM, outperforming conjugate PC c. For TNF alpha, conjugates 130, 133, 225, and PC c exhibited no significant induction at transfection concentrations of 100 nM and 10 nM.

TABLE 14
Results of in vitro immunogenicity assay of ANGPTL4 RNAi

| | | | IFN alpha | | IL-6 | | TNF alpha | |
|---|---|---|---|---|---|---|---|---|
| | Test | | Average | | Average | | Average | |
| Compound No. | concentration | | fold change | SD | fold change | SD | fold change | SD |
| Conjugate 130 | 100 | nM | 1.62 | 0.36 | 1.91 | 0.87 | 1.20 | 0.28 |
| Conjugate 133 | | | 1.03 | 0.14 | 1.15 | 0.15 | 1.00 | 0.00 |
| Conjugate 225 | | | 1.31 | 0.17 | 0.98 | 0.48 | 1.00 | 0.00 |
| PC c | | | 4.62 | 0.42 | 0.81 | 0.18 | 1.00 | 0.00 |
| polyIC | | | 21.08 | 6.98 | 6.03 | 2.54 | 14.95 | 9.90 |
| Conjugate 130 | 10 | nM | 1.38 | 0.23 | 1.34 | 0.18 | 1.64 | 0.90 |
| Conjugate 133 | | | 1.39 | 0.04 | 5.05 | 3.62 | 1.77 | 1.09 |
| Conjugate 225 | | | 0.94 | 0.06 | 0.86 | 0.12 | 2.20 | 1.70 |
| PC c | | | 2.14 | 0.02 | 3.08 | 0.30 | 1.49 | 0.69 |
| polyIC | | | 26.32 | 0.02 | 2.51 | 0.28 | 2.68 | 0.32 |
| Transfection Regent Control | Control | | 1.00 | 0.05 | 1.00 | 0.20 | 1.00 | 0.00 |
| naked siRNA (9 μg/mL) | | | 30.67 | 7.42 | 2.34 | 0.34 | 6.45 | 1.51 |
| naked siRNA (3 μg/mL) | | | 33.49 | 1.22 | 2.09 | 0.15 | 5.12 | 0.11 |
| GS9688 (8 μM) | | | 8.76 | 0.61 | 739.15 | 73.96 | 476.00 | 24.76 |
| GS9688 (2.5 μM) | | | 4.89 | 1.62 | 762.35 | 57.28 | 523.27 | 28.86 |
| DMSO | | | 1.00 | 0.00 | 1.00 | 0.39 | 1.00 | 0.00 |

### Example 6: In Vivo Activity Assay of ANGPTL4 RNAi

[0151] Male hANGPTL4 humanized mice (provided by Jiangsu GemPharmatech) aged 6 to 8 weeks were randomly divided into groups according to body weight, with 6 to 8 mice per group. On Day 1 (D1), the mice were subcutaneously administered PBS, PC c at 3 mpk, PC c at 9 mpk, and conjugate 19 at 3 mpk, respectively. On Day 8 and Day 22 after administration, liver samples were collected from 3 to 4 mice per group, which were fasted overnight before sampling. The hANGPTL4 mRNA levels in the liver were measured by qPCR to compare the knockdown efficiency of different conjugates on the target gene (Table 15). On D8, a single subcutaneous administration of conjugate 19 at 3 mpk showed 92% inhibition of hepatic hANGPTL4 mRNA, outperforming PC c at 3 mpk (78%) and PC c at 9 mpk (90%). On D22, conjugate 19 at 3 mpk still showed 72% inhibition of hepatic hANGPTL4 mRNA, whereas PC c at 3 mpk and PC c at 9 mpk showed only 40% and 42% inhibition, respectively. Conjugate 19 showed better inhibitory activity and persistence on the target gene compared to PC c.

TABLE 15
Inhibition of hepatic hANGPTL4 mRNA
by conjugates on D 8 and D 22

| | |
|---|---|
| D 8 | D 22 |

| Group | Mean | SEM | Mean | SEM |
|---|---|---|---|---|
| PBS | 1.06 | 0.06 | 1.00 | 0.06 |
| PC c, 3 mpk | 0.28 | 0.01 | 0.60 | 0.00 |
| PC c, 9 mpk | 0.10 | 0.00 | 0.58 | 0.01 |
| Conjugate 19, 3 mpk | 0.08 | 0.01 | 0.28 | 0.01 |

[0152] In summary, the siRNAs and their conjugates of the present disclosure exhibit good to excellent in vitro inhibitory activity against ANGPTL4 gene expression, can effectively inhibit ANGPTL4 mRNA levels across multiple cell lines, demonstrate satisfactory immunostimulation, and can significantly reduce ANGPTL4 mRNA expression at the animal level.

The application's sequence listing, which the Patent Office published only in electronic form, follows.

SEQUENCE LISTING (685 sequences)

SEQ ID NO: 1 - RNA, 23 nt, synthetic construct
  source 1..23: mol_type = other RNA
tccaagtggagaagggtacggag

SEQ ID NO: 2 - RNA, 23 nt, synthetic construct
  source 1..23: mol_type = other RNA
tcccaagtggagaagggtacgga

SEQ ID NO: 3 - RNA, 23 nt, synthetic construct
  source 1..23: mol_type = other RNA
tcaaaccaccagcctccagagag

SEQ ID NO: 4 - RNA, 23 nt, synthetic construct
  source 1..23: mol_type = other RNA
agatcaacatggtggtggcctgc

SEQ ID NO: 5 - RNA, 23 nt, synthetic construct
  source 1..23: mol_type = other RNA
atcgtgatcctggtcccaagtgg

SEQ ID NO: 6 - RNA, 23 nt, synthetic construct
  source 1..23: mol_type = other RNA
tgcaggctgtgaaggacctcagg

SEQ ID NO: 7 - RNA, 23 nt, synthetic construct
  source 1..23: mol_type = other RNA
tcgtgatcctggtcccaagtgga

SEQ ID NO: 8 - RNA, 23 nt, synthetic construct
  source 1..23: mol_type = other RNA
tggtcccaagtggagaagggtac

SEQ ID NO: 9 - RNA, 23 nt, synthetic construct
  source 1..23: mol_type = other RNA
tgtgatcctggtcccaagtggag

SEQ ID NO: 10 - RNA, 23 nt, synthetic construct
  source 1..23: mol_type = other RNA
tggatcaacatggtggtggcctg

SEQ ID NO: 11 - RNA, 23 nt, synthetic construct
  source 1..23: mol_type = other RNA
ttgtgaaggacctcagggtccac

SEQ ID NO: 12 - RNA, 23 nt, synthetic construct
  source 1..23: mol_type = other RNA
tcgccaggtcttccagaagattc

SEQ ID NO: 13 - RNA, 23 nt, synthetic construct
  source 1..23: mol_type = other RNA
tgtgggatggagcggaagtactg

SEQ ID NO: 14 - RNA, 23 nt, synthetic construct
  source 1..23: mol_type = other RNA
aaacagctcctggcaatccctgg

SEQ ID NO: 15 - RNA, 23 nt, synthetic construct
  source 1..23: mol_type = other RNA
actggatcaacatggtggtggcc

SEQ ID NO: 16 - RNA, 23 nt, synthetic construct
  source 1..23: mol_type = other RNA
agaggtcgtgatcctggtcccaa

SEQ ID NO: 17 - RNA, 23 nt, synthetic construct
  source 1..23: mol_type = other RNA
tcctggtcccaagtggagaaggg

SEQ ID NO: 18 - RNA, 23 nt, synthetic construct
  source 1..23: mol_type = other RNA
ttggatcaacatggtggtggcct

SEQ ID NO: 19 - RNA, 23 nt, synthetic construct
  source 1..23: mol_type = other RNA
aatcctggtcccaagtggagaag

SEQ ID NO: 20 - RNA, 23 nt, synthetic construct
  source 1..23: mol_type = other RNA
aatggagcggaagtactggccgt

SEQ ID NO: 21 - RNA, 23 nt, synthetic construct
  source 1..23: mol_type = other RNA
tagagaggctcttggcgcagttc

SEQ ID NO: 22 - RNA, 23 nt, synthetic construct
  source 1..23: mol_type = other RNA
tgctgggccaccttgtggaagag

SEQ ID NO: 23 - RNA, 23 nt, synthetic construct
  source 1..23: mol_type = other RNA
tgagttgtgtctgcaggctgtga

SEQ ID NO: 24 - RNA, 23 nt, synthetic construct
  source 1..23: mol_type = other RNA
taggctgtgaaggacctcagggt

SEQ ID NO: 25 - RNA, 23 nt, synthetic construct
  source 1..23: mol_type = other RNA
tcaccttgtggaagagttgctgg

SEQ ID NO: 26 - RNA, 23 nt, synthetic construct
  source 1..23: mol_type = other RNA
ttggtcccaagtggagaagggta

SEQ ID NO: 27 - RNA, 23 nt, synthetic construct
  source 1..23: mol_type = other RNA
tcttgtccctgcggaggtcgtga

SEQ ID NO: 28 - RNA, 23 nt, synthetic construct
  source 1..23: mol_type = other RNA
tgggccaccttgtggaagagttg

SEQ ID NO: 29 - RNA, 23 nt, synthetic construct
  source 1..23: mol_type = other RNA
tgagccttgagttgtgtctgcag

SEQ ID NO: 30 - RNA, 23 nt, synthetic construct
  source 1..23: mol_type = other RNA
atgatcctggtcccaagtggaga

SEQ ID NO: 31 - RNA, 23 nt, synthetic construct
  source 1..23: mol_type = other RNA
tttgtccctgcggaggtcgtgat

SEQ ID NO: 32 - RNA, 23 nt, synthetic construct
  source 1..23: mol_type = other RNA
aatcaacatggtggtggcctgca

SEQ ID NO: 33 - RNA, 23 nt, synthetic construct
  source 1..23: mol_type = other RNA
aaattcgcaggtgctgcttctcc

SEQ ID NO: 34 - RNA, 23 nt, synthetic construct
  source 1..23: mol_type = other RNA
actgaattcgcaggtgctgcttc

SEQ ID NO: 35 - RNA, 23 nt, synthetic construct
  source 1..23: mol_type = other RNA
tgaattcgcaggtgctgcttctc

SEQ ID NO: 36 - RNA, 23 nt, synthetic construct
  source 1..23: mol_type = other RNA
aggctggatcaacatggtggtgg

SEQ ID NO: 37 - RNA, 23 nt, synthetic construct
  source 1..23: mol_type = other RNA
tgtggaagagttgctggatcctg

SEQ ID NO: 38 - RNA, 23 nt, synthetic construct
  source 1..23: mol_type = other RNA
accttgtggaagagttgctggat

SEQ ID NO: 39 - RNA, 23 nt, synthetic construct
  source 1..23: mol_type = other RNA
ttgagccttgagttgtgtctgca

SEQ ID NO: 40 - RNA, 23 nt, synthetic construct
  source 1..23: mol_type = other RNA
aaccaccagcctccagagaggct

SEQ ID NO: 41 - RNA, 23 nt, synthetic construct
  source 1..23: mol_type = other RNA
tcaacatggtggtggcctgcagc

SEQ ID NO: 42 - RNA, 23 nt, synthetic construct
  source 1..23: mol_type = other RNA
tgggctggatcaacatggtggtg

SEQ ID NO: 43 - RNA, 23 nt, synthetic construct
  source 1..23: mol_type = other RNA
tgctgaattcgcaggtgctgctt

SEQ ID NO: 44 - RNA, 23 nt, synthetic construct
  source 1..23: mol_type = other RNA
agaggctcttggcgcagttcttg

SEQ ID NO: 45 - RNA, 23 nt, synthetic construct
  source 1..23: mol_type = other RNA
tgaggttggaatggctgcaggtg

SEQ ID NO: 46 - RNA, 23 nt, synthetic construct
  source 1..23: mol_type = other RNA
atcaacatggtggtggcctgcag

SEQ ID NO: 47 - RNA, 23 nt, synthetic construct
  source 1..23: mol_type = other RNA
actgttctgagccttgagttgtg

SEQ ID NO: 48 - RNA, 23 nt, synthetic construct
  source 1..23: mol_type = other RNA
tgctgtgggatggagcggaagta

SEQ ID NO: 49 - RNA, 23 nt, synthetic construct
  source 1..23: mol_type = other RNA
actggatcctgctgttctgagcc

SEQ ID NO: 50 - RNA, 23 nt, synthetic construct
  source 1..23: mol_type = other RNA
ttgggccaccttgtggaagagtt

SEQ ID NO: 51 - RNA, 23 nt, synthetic construct
  source 1..23: mol_type = other RNA
accagcctccagagaggctcttg

SEQ ID NO: 52 - RNA, 23 nt, synthetic construct
  source 1..23: mol_type = other RNA
taccagcctccagagaggctctt

SEQ ID NO: 53 - RNA, 23 nt, synthetic construct
  source 1..23: mol_type = other RNA
ttggatcctgctgttctgagcct

SEQ ID NO: 54 - RNA, 23 nt, synthetic construct
  source 1..23: mol_type = other RNA
aggtgccaaaccaccagcctcca

SEQ ID NO: 55 - RNA, 23 nt, synthetic construct
  source 1..23: mol_type = other RNA
aagaggctcttggcgcagttctt

SEQ ID NO: 56 - RNA, 23 nt, synthetic construct
  source 1..23: mol_type = other RNA
aaggctcttggcgcagttcttgt

SEQ ID NO: 57 - RNA, 23 nt, synthetic construct
  source 1..23: mol_type = other RNA
ttgtgtctgcaggctgtgaagga

SEQ ID NO: 58 - RNA, 23 nt, synthetic construct
  source 1..23: mol_type = other RNA
ttgtccctgcggaggtcgtgatc

SEQ ID NO: 59 - RNA, 23 nt, synthetic construct
  source 1..23: mol_type = other RNA
tctgagccttgagttgtgtctgc

SEQ ID NO: 60 - RNA, 23 nt, synthetic construct
  source 1..23: mol_type = other RNA
attgctggatcctgctgttctga

SEQ ID NO: 61 - RNA, 23 nt, synthetic construct
  source 1..23: mol_type = other RNA
tggctgcaggtgccaaaccacca

SEQ ID NO: 62 - RNA, 23 nt, synthetic construct
  source 1..23: mol_type = other RNA
tgctgctgggccaccttgtggaa

SEQ ID NO: 63 - RNA, 23 nt, synthetic construct
  source 1..23: mol_type = other RNA
tagttcttgtccctgcggaggtc

SEQ ID NO: 64 - RNA, 23 nt, synthetic construct
  source 1..23: mol_type = other RNA
ttcttgtccctgcggaggtcgtg

SEQ ID NO: 65 - RNA, 23 nt, synthetic construct
  source 1..23: mol_type = other RNA
ttgttctgagccttgagttgtgt

SEQ ID NO: 66 - RNA, 23 nt, synthetic construct
  source 1..23: mol_type = other RNA
aggctcttggcgcagttcttgtc

SEQ ID NO: 67 - RNA, 23 nt, synthetic construct
  source 1..23: mol_type = other RNA
attctgagccttgagttgtgtct

SEQ ID NO: 68 - RNA, 23 nt, synthetic construct
  source 1..23: mol_type = other RNA
tgcaggtgccaaaccaccagcct

SEQ ID NO: 69 - RNA, 23 nt, synthetic construct
  source 1..23: mol_type = other RNA
attcttgtccctgcggaggtcgt

SEQ ID NO: 70 - RNA, 23 nt, synthetic construct
  source 1..23: mol_type = other RNA
acagttcttgtccctgcggaggt

SEQ ID NO: 71 - RNA, 23 nt, synthetic construct
  source 1..23: mol_type = other RNA
atcctgctgttctgagccttgag

SEQ ID NO: 72 - RNA, 23 nt, synthetic construct
  source 1..23: mol_type = other RNA
tctctttcttcgggcaggcttgg

SEQ ID NO: 73 - RNA, 23 nt, synthetic construct
  source 1..23: mol_type = other RNA
ttctttcttcgggcaggcttggc

SEQ ID NO: 74 - RNA, 23 nt, synthetic construct
  source 1..23: mol_type = other RNA
ttctgagccttgagttgtgtctg

SEQ ID NO: 75 - RNA, 23 nt, synthetic construct
  source 1..23: mol_type = other RNA
acctctttcttcgggcaggcttg

SEQ ID NO: 76 - RNA, 23 nt, synthetic construct
  source 1..23: mol_type = other RNA
ttgctgttctgagccttgagttg

SEQ ID NO: 77 - RNA, 23 nt, synthetic construct
  source 1..23: mol_type = other RNA
tttcttcgggcaggcttggccac

SEQ ID NO: 78 - RNA, 23 nt, synthetic construct
  source 1..23: mol_type = other RNA
agagttgctggatcctgctgttc

SEQ ID NO: 79 - RNA, 23 nt, synthetic construct
  source 1..23: mol_type = other RNA
ttttcttcgggcaggcttggcca

SEQ ID NO: 80 - RNA, 23 nt, synthetic construct
  source 1..23: mol_type = other RNA
tctttcttcgggcaggcttggcc

SEQ ID NO: 81 - RNA, 23 nt, synthetic construct
  source 1..23: mol_type = other RNA
tcctgctgttctgagccttgagt

SEQ ID NO: 82 - RNA, 23 nt, synthetic construct
  source 1..23: mol_type = other RNA
ttcttggcgcagttcttgtccct

SEQ ID NO: 83 - RNA, 23 nt, synthetic construct
  source 1..23: mol_type = other RNA
tctgctgttctgagccttgagtt

SEQ ID NO: 84 - RNA, 23 nt, synthetic construct
  source 1..23: mol_type = other RNA
aagttgctggatcctgctgttct

SEQ ID NO: 85 - RNA, 23 nt, synthetic construct
  source 1..23: mol_type = other RNA
agcctctttcttcgggcaggctt

SEQ ID NO: 86 - RNA, 23 nt, synthetic construct
  source 1..23: mol_type = other RNA
agagccaagagtcaccgtctttc

SEQ ID NO: 87 - RNA, 23 nt, synthetic construct
  source 1..23: mol_type = other RNA
tagagccaagagtcaccgtcttt

SEQ ID NO: 88 - RNA, 23 nt, synthetic construct
  source 1..23: mol_type = other RNA
tacatcctcgggcagagccaaga

SEQ ID NO: 89 - RNA, 23 nt, synthetic construct
  source 1..23: mol_type = other RNA
tcacatcctcgggcagagccaag

SEQ ID NO: 90 - RNA, 23 nt, synthetic construct
  source 1..23: mol_type = other RNA
ttccagatggcccctccttggag

SEQ ID NO: 91 - RNA, 23 nt, synthetic construct
  source 1..23: mol_type = other RNA
agtttccagatggcccctccttg

SEQ ID NO: 92 - RNA, 23 nt, synthetic construct
  source 1..23: mol_type = other RNA
aagtttccagatggcccctcctt

SEQ ID NO: 93 - RNA, 23 nt, synthetic construct
  source 1..23: mol_type = other RNA
taagtttccagatggcccctcct

SEQ ID NO: 94 - RNA, 23 nt, synthetic construct
  source 1..23: mol_type = other RNA
tcttctctgtccacaagtttcca

SEQ ID NO: 95 - RNA, 23 nt, synthetic construct
  source 1..23: mol_type = other RNA
tggtcttcttctctgtccacaag

SEQ ID NO: 96 - RNA, 23 nt, synthetic construct
  source 1..23: mol_type = other RNA
tctccagtcgtggtcttcttctc

SEQ ID NO: 97 - RNA, 23 nt, synthetic construct
  source 1..23: mol_type = other RNA
ttctccagtcgtggtcttcttct

SEQ ID NO: 98 - RNA, 23 nt, synthetic construct
  source 1..23: mol_type = other RNA
tgatctcaggaggcaacgcatgc

SEQ ID NO: 99 - RNA, 23 nt, synthetic construct
  source 1..23: mol_type = other RNA
tgcagcctcgatctcaggaggca

SEQ ID NO: 100 - RNA, 23 nt, synthetic construct
  source 1..23: mol_type = other RNA
ttgcagcctcgatctcaggaggc

SEQ ID NO: 101 - RNA, 23 nt, synthetic construct
  source 1..23: mol_type = other RNA
tcctgcagcctcgatctcaggag

SEQ ID NO: 102 - RNA, 23 nt, synthetic construct
  source 1..23: mol_type = other RNA
atcctgcagcctcgatctcagga

SEQ ID NO: 103 - RNA, 23 nt, synthetic construct
  source 1..23: mol_type = other RNA
tatcctgcagcctcgatctcagg

SEQ ID NO: 104 - RNA, 23 nt, synthetic construct
  source 1..23: mol_type = other RNA
tatgccccttggtccacgcctct

SEQ ID NO: 105 - RNA, 23 nt, synthetic construct
  source 1..23: mol_type = other RNA
aagctccatgccccttggtccac

SEQ ID NO: 106 - RNA, 23 nt, synthetic construct
  source 1..23: mol_type = other RNA
aaagctccatgccccttggtcca

SEQ ID NO: 107 - RNA, 23 nt, synthetic construct
  source 1..23: mol_type = other RNA
tgaagctccatgccccttggtcc

SEQ ID NO: 108 - RNA, 23 nt, synthetic construct
  source 1..23: mol_type = other RNA
atgaagctccatgccccttggtc

SEQ ID NO: 109 - RNA, 23 nt, synthetic construct
  source 1..23: mol_type = other RNA
agtgaagctccatgccccttggt

SEQ ID NO: 110 - RNA, 23 nt, synthetic construct
  source 1..23: mol_type = other RNA
aagtgaagctccatgccccttgg

SEQ ID NO: 111 - RNA, 23 nt, synthetic construct
  source 1..23: mol_type = other RNA
agagtgaagctccatgccccttg

SEQ ID NO: 112 - RNA, 23 nt, synthetic construct
  source 1..23: mol_type = other RNA
aggagtgaagctccatgcccctt

SEQ ID NO: 113 - RNA, 23 nt, synthetic construct
  source 1..23: mol_type = other RNA
aaggagtgaagctccatgcccct

SEQ ID NO: 114 - RNA, 23 nt, synthetic construct
  source 1..23: mol_type = other RNA
taaggagtgaagctccatgcccc

SEQ ID NO: 115 - RNA, 23 nt, synthetic construct
  source 1..23: mol_type = other RNA
agccagcaaggagtgaagctcca

SEQ ID NO: 116 - RNA, 23 nt, synthetic construct
  source 1..23: mol_type = other RNA
tggccagcaaggagtgaagctcc

SEQ ID NO: 117 - RNA, 23 nt, synthetic construct
  source 1..23: mol_type = other RNA
aactccctggccagcaaggagtg

SEQ ID NO: 118 - RNA, 23 nt, synthetic construct
  source 1..23: mol_type = other RNA
taactccctggccagcaaggagt

SEQ ID NO: 119 - RNA, 23 nt, synthetic construct
  source 1..23: mol_type = other RNA
ttgagtccccaactccctggcca

SEQ ID NO: 120 - RNA, 23 nt, synthetic construct
  source 1..23: mol_type = other RNA
tctctgagtccccaactccctgg

SEQ ID NO: 121 - RNA, 23 nt, synthetic construct
  source 1..23: mol_type = other RNA
tccctctgagtccccaactccct

SEQ ID NO: 122 - RNA, 23 nt, synthetic construct
  source 1..23: mol_type = other RNA
atccctctgagtccccaactccc

SEQ ID NO: 123 - RNA, 23 nt, synthetic construct
  source 1..23: mol_type = other RNA
atggtccctctgagtccccaact

SEQ ID NO: 124 - RNA, 23 nt, synthetic construct
  source 1..23: mol_type = other RNA
accccaagtggtccctctgagtc

SEQ ID NO: 125 - RNA, 23 nt, synthetic construct
  source 1..23: mol_type = other RNA
aatgtgactgagtccgccattga

SEQ ID NO: 126 - RNA, 23 nt, synthetic construct
  source 1..23: mol_type = other RNA
taatgtgactgagtccgccattg

SEQ ID NO: 127 - RNA, 23 nt, synthetic construct
  source 1..23: mol_type = other RNA
tcaatgtgactgagtccgccatt

SEQ ID NO: 128 - RNA, 23 nt, synthetic construct
  source 1..23: mol_type = other RNA
atcaatgtgactgagtccgccat

SEQ ID NO: 129 - RNA, 23 nt, synthetic construct
  source 1..23: mol_type = other RNA
atcagtcaatgtgactgagtccg

SEQ ID NO: 130 - RNA, 23 nt, synthetic construct
  source 1..23: mol_type = other RNA
tgtcagtcaatgtgactgagtcc

SEQ ID NO: 131 - RNA, 23 nt, synthetic construct
  source 1..23: mol_type = other RNA
atccccgtcagtcaatgtgactg

SEQ ID NO: 132 - RNA, 23 nt, synthetic construct
  source 1..23: mol_type = other RNA
tggtccccgtcagtcaatgtgac

SEQ ID NO: 133 - RNA, 23 nt, synthetic construct
  source 1..23: mol_type = other RNA
acctacacacaacagcaccagca

SEQ ID NO: 134 - RNA, 23 nt, synthetic construct
  source 1..23: mol_type = other RNA
aacctacacacaacagcaccagc

SEQ ID NO: 135 - RNA, 23 nt, synthetic construct
  source 1..23: mol_type = other RNA
aggggacctacacacaacagcac

SEQ ID NO: 136 - RNA, 23 nt, synthetic construct
  source 1..23: mol_type = other RNA
taggggacctacacacaacagca

SEQ ID NO: 137 - RNA, 23 nt, synthetic construct
  source 1..23: mol_type = other RNA
tccaggggacctacacacaacag

SEQ ID NO: 138 - RNA, 23 nt, synthetic construct
  source 1..23: mol_type = other RNA
tccccaggggacctacacacaac

SEQ ID NO: 139 - RNA, 23 nt, synthetic construct
  source 1..23: mol_type = other RNA
atccccaggggacctacacacaa

SEQ ID NO: 140 - RNA, 23 nt, synthetic construct
  source 1..23: mol_type = other RNA
ataccattggcgcctgcttgtgt

SEQ ID NO: 141 - RNA, 23 nt, synthetic construct
  source 1..23: mol_type = other RNA
agataccattggcgcctgcttgt

SEQ ID NO: 142 - RNA, 23 nt, synthetic construct
  source 1..23: mol_type = other RNA
tgcccagataccattggcgcctg

SEQ ID NO: 143 - RNA, 23 nt, synthetic construct
  source 1..23: mol_type = other RNA
attgcttttattccaagaactct

SEQ ID NO: 144 - RNA, 23 nt, synthetic construct
  source 1..23: mol_type = other RNA
agttgcttttattccaagaactc

SEQ ID NO: 145 - RNA, 23 nt, synthetic construct
  source 1..23: mol_type = other RNA
aggttgcttttattccaagaact

SEQ ID NO: 146 - RNA, 23 nt, synthetic construct
  source 1..23: mol_type = other RNA
aaggttgcttttattccaagaac

SEQ ID NO: 147 - RNA, 23 nt, synthetic construct
  source 1..23: mol_type = other RNA
ttctgaggttgcttttattccaa

SEQ ID NO: 148 - RNA, 23 nt, synthetic construct
  source 1..23: mol_type = other RNA
attctgaggttgcttttattcca

SEQ ID NO: 149 - RNA, 23 nt, synthetic construct
  source 1..23: mol_type = other RNA
tgttctgaggttgcttttattcc

SEQ ID NO: 150 - RNA, 23 nt, synthetic construct
  source 1..23: mol_type = other RNA
tgtctttcgtgggcctgggacca

SEQ ID NO: 151 - RNA, 23 nt, synthetic construct
  source 1..23: mol_type = other RNA
atcaccgtctttcgtgggcctgg

SEQ ID NO: 152 - RNA, 23 nt, synthetic construct
  source 1..23: mol_type = other RNA
agtcaccgtctttcgtgggcctg

SEQ ID NO: 153 - RNA, 23 nt, synthetic construct
  source 1..23: mol_type = other RNA
aagtcaccgtctttcgtgggcct

SEQ ID NO: 154 - RNA, 23 nt, synthetic construct
  source 1..23: mol_type = other RNA
agccaagagtcaccgtctttcgt

SEQ ID NO: 155 - RNA, 23 nt, synthetic construct
  source 1..23: mol_type = other RNA
aagccaagagtcaccgtctttcg

SEQ ID NO: 156 - RNA, 23 nt, synthetic construct
  source 1..23: mol_type = other RNA
tttccagatggcccctccttgga

SEQ ID NO: 157 - RNA, 23 nt, synthetic construct
  source 1..23: mol_type = other RNA
tccacaagtttccagatggcccc

SEQ ID NO: 158 - RNA, 23 nt, synthetic construct
  source 1..23: mol_type = other RNA
tgtccacaagtttccagatggcc

SEQ ID NO: 159 - RNA, 23 nt, synthetic construct
  source 1..23: mol_type = other RNA
tttctctgtccacaagtttccag

SEQ ID NO: 160 - RNA, 23 nt, synthetic construct
  source 1..23: mol_type = other RNA
ttcttctctgtccacaagtttcc

SEQ ID NO: 161 - RNA, 23 nt, synthetic construct
  source 1..23: mol_type = other RNA
tttcttctctgtccacaagtttc

SEQ ID NO: 162 - RNA, 23 nt, synthetic construct
  source 1..23: mol_type = other RNA
atggtcttcttctctgtccacaa

SEQ ID NO: 163 - RNA, 23 nt, synthetic construct
  source 1..23: mol_type = other RNA
acttctccagtcgtggtcttctt

SEQ ID NO: 164 - RNA, 23 nt, synthetic construct
  source 1..23: mol_type = other RNA
agtctgagcatatcctgcagcct

SEQ ID NO: 165 - RNA, 23 nt, synthetic construct
  source 1..23: mol_type = other RNA
atccacgcctctagagtctgagc

SEQ ID NO: 166 - RNA, 23 nt, synthetic construct
  source 1..23: mol_type = other RNA
agtccacgcctctagagtctgag

SEQ ID NO: 167 - RNA, 23 nt, synthetic construct
  source 1..23: mol_type = other RNA
tggtccacgcctctagagtctga

SEQ ID NO: 168 - RNA, 23 nt, synthetic construct
  source 1..23: mol_type = other RNA
ttggtccacgcctctagagtctg

SEQ ID NO: 169 - RNA, 23 nt, synthetic construct
  source 1..23: mol_type = other RNA
tttggtccacgcctctagagtct

SEQ ID NO: 170 - RNA, 23 nt, synthetic construct
  source 1..23: mol_type = other RNA
actccctggccagcaaggagtga

SEQ ID NO: 171 - RNA, 23 nt, synthetic construct
  source 1..23: mol_type = other RNA
tcctctgagtccccaactccctg

SEQ ID NO: 172 - RNA, 23 nt, synthetic construct
  source 1..23: mol_type = other RNA
agccccaagtggtccctctgagt

SEQ ID NO: 173 - RNA, 23 nt, synthetic construct
  source 1..23: mol_type = other RNA
tagtctggctggccccaagtggt

SEQ ID NO: 174 - RNA, 23 nt, synthetic construct
  source 1..23: mol_type = other RNA
ttgagtccgccattgaggccagt

SEQ ID NO: 175 - RNA, 23 nt, synthetic construct
  source 1..23: mol_type = other RNA
actgagtccgccattgaggccag

SEQ ID NO: 176 - RNA, 23 nt, synthetic construct
  source 1..23: mol_type = other RNA
aactgagtccgccattgaggcca

SEQ ID NO: 177 - RNA, 23 nt, synthetic construct
  source 1..23: mol_type = other RNA
tccgtcagtcaatgtgactgagt

SEQ ID NO: 178 - RNA, 23 nt, synthetic construct
  source 1..23: mol_type = other RNA
agccctggtccccgtcagtcaat

SEQ ID NO: 179 - RNA, 23 nt, synthetic construct
  source 1..23: mol_type = other RNA
tacacacaacagcaccagcacca

SEQ ID NO: 180 - RNA, 23 nt, synthetic construct
  source 1..23: mol_type = other RNA
tagataccattggcgcctgcttg

SEQ ID NO: 181 - RNA, 23 nt, synthetic construct
  source 1..23: mol_type = other RNA
atgagctccgcccagataccatt

SEQ ID NO: 182 - RNA, 23 nt, synthetic construct
  source 1..23: mol_type = other RNA
atttccagatggcccctccttgg

SEQ ID NO: 183 - RNA, 23 nt, synthetic construct
  source 1..23: mol_type = other RNA
acaagtttccagatggcccctcc

SEQ ID NO: 184 - RNA, 23 nt, synthetic construct
  source 1..23: mol_type = other RNA
ttgtccacaagtttccagatggc

SEQ ID NO: 185 - RNA, 23 nt, synthetic construct
  source 1..23: mol_type = other RNA
ttctctgtccacaagtttccaga

SEQ ID NO: 186 - RNA, 23 nt, synthetic construct
  source 1..23: mol_type = other RNA
tgtggtcttcttctctgtccaca

SEQ ID NO: 187 - RNA, 23 nt, synthetic construct
  source 1..23: mol_type = other RNA
tccagtcgtggtcttcttctctg

SEQ ID NO: 188 - RNA, 23 nt, synthetic construct
  source 1..23: mol_type = other RNA
ttccagtcgtggtcttcttctct

SEQ ID NO: 189 - RNA, 23 nt, synthetic construct
  source 1..23: mol_type = other RNA
aggggcttctccagtcgtggtct

SEQ ID NO: 190 - RNA, 23 nt, synthetic construct
  source 1..23: mol_type = other RNA
tctgagcatatcctgcagcctcg

SEQ ID NO: 191 - RNA, 23 nt, synthetic construct
  source 1..23: mol_type = other RNA
ttggccagcaaggagtgaagctc

SEQ ID NO: 192 - RNA, 23 nt, synthetic construct
  source 1..23: mol_type = other RNA
ttccctggccagcaaggagtgaa

SEQ ID NO: 193 - RNA, 23 nt, synthetic construct
  source 1..23: mol_type = other RNA
atccccaactccctggccagcaa

SEQ ID NO: 194 - RNA, 23 nt, synthetic construct
  source 1..23: mol_type = other RNA
ttctgagtccccaactccctggc

SEQ ID NO: 195 - RNA, 23 nt, synthetic construct
  source 1..23: mol_type = other RNA
tggtccctctgagtccccaactc

SEQ ID NO: 196 - RNA, 23 nt, synthetic construct
  source 1..23: mol_type = other RNA
agtggtccctctgagtccccaac

SEQ ID NO: 197 - RNA, 23 nt, synthetic construct
  source 1..23: mol_type = other RNA
aagtggtccctctgagtccccaa

SEQ ID NO: 198 - RNA, 23 nt, synthetic construct
  source 1..23: mol_type = other RNA
taagtggtccctctgagtcccca

SEQ ID NO: 199 - RNA, 23 nt, synthetic construct
  source 1..23: mol_type = other RNA
tgccattgaggccagtctggctg

SEQ ID NO: 200 - RNA, 23 nt, synthetic construct
  source 1..23: mol_type = other RNA
tcgccattgaggccagtctggct

SEQ ID NO: 201 - RNA, 23 nt, synthetic construct
  source 1..23: mol_type = other RNA
tcctggtccccgtcagtcaatgt

SEQ ID NO: 202 - RNA, 23 nt, synthetic construct
  source 1..23: mol_type = other RNA
taagccctggtccccgtcagtca

SEQ ID NO: 203 - RNA, 23 nt, synthetic construct
  source 1..23: mol_type = other RNA
tgcttgtgtccccaggggaccta

SEQ ID NO: 204 - RNA, 23 nt, synthetic construct
  source 1..23: mol_type = other RNA
ttgcttgtgtccccaggggacct

SEQ ID NO: 205 - RNA, 23 nt, synthetic construct
  source 1..23: mol_type = other RNA
tgtgagctccgcccagataccat

SEQ ID NO: 206 - RNA, 23 nt, synthetic construct
  source 1..23: mol_type = other RNA
ttgtgagctccgcccagatacca

SEQ ID NO: 207 - RNA, 23 nt, synthetic construct
  source 1..23: mol_type = other RNA
tctgtgagctccgcccagatacc

SEQ ID NO: 208 - RNA, 23 nt, synthetic construct
  source 1..23: mol_type = other RNA
tcaagaactctgtgagctccgcc

SEQ ID NO: 209 - RNA, 21 nt, synthetic construct
  source 1..21: mol_type = other RNA
attgcttttattccaagaact

SEQ ID NO: 210 - RNA, 23 nt, synthetic construct
  source 1..23: mol_type = other RNA
attgcttttattccaagaacttt

SEQ ID NO: 211 - RNA, 22 nt, synthetic construct
  source 1..22: mol_type = other RNA
attgcttttattccaagaactc

SEQ ID NO: 212 - RNA, 21 nt, synthetic construct
  source 1..21: mol_type = other RNA
ccgtacccttctccacttgga

SEQ ID NO: 213 - RNA, 21 nt, synthetic construct
  source 1..21: mol_type = other RNA
cgtacccttctccacttggga

SEQ ID NO: 214 - RNA, 21 nt, synthetic construct
  source 1..21: mol_type = other RNA
ctctggaggctggtggtttga

SEQ ID NO: 215 - RNA, 21 nt, synthetic construct
  source 1..21: mol_type = other RNA
aggccaccaccatgttgatct

SEQ ID NO: 216 - RNA, 21 nt, synthetic construct
  source 1..21: mol_type = other RNA
acttgggaccaggatcacgat

SEQ ID NO: 217 - RNA, 21 nt, synthetic construct
  source 1..21: mol_type = other RNA
tgaggtccttcacagcctgca

SEQ ID NO: 218 - RNA, 21 nt, synthetic construct
  source 1..21: mol_type = other RNA
cacttgggaccaggatcacga

SEQ ID NO: 219 - RNA, 21 nt, synthetic construct
  source 1..21: mol_type = other RNA
acccttctccacttgggacca

SEQ ID NO: 220 - RNA, 21 nt, synthetic construct
  source 1..21: mol_type = other RNA
ccacttgggaccaggatcaca

SEQ ID NO: 221 - RNA, 21 nt, synthetic construct
  source 1..21: mol_type = other RNA
ggccaccaccatgttgatcca

SEQ ID NO: 222 - RNA, 21 nt, synthetic construct
  source 1..21: mol_type = other RNA
ggaccctgaggtccttcacaa

SEQ ID NO: 223 - RNA, 21 nt, synthetic construct
  source 1..21: mol_type = other RNA
atcttctggaagacctggcga

SEQ ID NO: 224 - RNA, 21 nt, synthetic construct
  source 1..21: mol_type = other RNA
gtacttccgctccatcccaca

SEQ ID NO: 225 - RNA, 21 nt, synthetic construct
  source 1..21: mol_type = other RNA
agggattgccaggagctgttt

SEQ ID NO: 226 - RNA, 21 nt, synthetic construct
  source 1..21: mol_type = other RNA
ccaccaccatgttgatccagt

SEQ ID NO: 227 - RNA, 21 nt, synthetic construct
  source 1..21: mol_type = other RNA
gggaccaggatcacgacctct

SEQ ID NO: 228 - RNA, 21 nt, synthetic construct
  source 1..21: mol_type = other RNA
cttctccacttgggaccagga

SEQ ID NO: 229 - RNA, 21 nt, synthetic construct
  source 1..21: mol_type = other RNA
gccaccaccatgttgatccaa

SEQ ID NO: 230 - RNA, 21 nt, synthetic construct
  source 1..21: mol_type = other RNA
tctccacttgggaccaggatt

SEQ ID NO: 231 - RNA, 21 nt, synthetic construct
  source 1..21: mol_type = other RNA
ggccagtacttccgctccatt

SEQ ID NO: 232 - RNA, 21 nt, synthetic construct
  source 1..21: mol_type = other RNA
actgcgccaagagcctctcta

SEQ ID NO: 233 - RNA, 21 nt, synthetic construct
  source 1..21: mol_type = other RNA
cttccacaaggtggcccagca

SEQ ID NO: 234 - RNA, 21 nt, synthetic construct
  source 1..21: mol_type = other RNA
acagcctgcagacacaactca

SEQ ID NO: 235 - RNA, 21 nt, synthetic construct
  source 1..21: mol_type = other RNA
cctgaggtccttcacagccta

SEQ ID NO: 236 - RNA, 21 nt, synthetic construct
  source 1..21: mol_type = other RNA
agcaactcttccacaaggtga

SEQ ID NO: 237 - RNA, 21 nt, synthetic construct
  source 1..21: mol_type = other RNA
cccttctccacttgggaccaa

SEQ ID NO: 238 - RNA, 21 nt, synthetic construct
  source 1..21: mol_type = other RNA
acgacctccgcagggacaaga

SEQ ID NO: 239 - RNA, 21 nt, synthetic construct
  source 1..21: mol_type = other RNA
actcttccacaaggtggccca

SEQ ID NO: 240 - RNA, 21 nt, synthetic construct
  source 1..21: mol_type = other RNA
gcagacacaactcaaggctca

SEQ ID NO: 241 - RNA, 21 nt, synthetic construct
  source 1..21: mol_type = other RNA
tccacttgggaccaggatcat

SEQ ID NO: 242 - RNA, 21 nt, synthetic construct
  source 1..21: mol_type = other RNA
cacgacctccgcagggacaaa

SEQ ID NO: 243 - RNA, 21 nt, synthetic construct
  source 1..21: mol_type = other RNA
caggccaccaccatgttgatt

SEQ ID NO: 244 - RNA, 21 nt, synthetic construct
  source 1..21: mol_type = other RNA
agaagcagcacctgcgaattt

SEQ ID NO: 245 - RNA, 21 nt, synthetic construct
  source 1..21: mol_type = other RNA
agcagcacctgcgaattcagt

SEQ ID NO: 246 - RNA, 21 nt, synthetic construct
  source 1..21: mol_type = other RNA
gaagcagcacctgcgaattca

SEQ ID NO: 247 - RNA, 21 nt, synthetic construct
  source 1..21: mol_type = other RNA
accaccatgttgatccagcct

SEQ ID NO: 248 - RNA, 21 nt, synthetic construct
  source 1..21: mol_type = other RNA
ggatccagcaactcttccaca

SEQ ID NO: 249 - RNA, 21 nt, synthetic construct
  source 1..21: mol_type = other RNA
ccagcaactcttccacaaggt

SEQ ID NO: 250 - RNA, 21 nt, synthetic construct
  source 1..21: mol_type = other RNA
cagacacaactcaaggctcaa

SEQ ID NO: 251 - RNA, 21 nt, synthetic construct
  source 1..21: mol_type = other RNA
cctctctggaggctggtggtt

SEQ ID NO: 252 - RNA, 21 nt, synthetic construct
  source 1..21: mol_type = other RNA
tgcaggccaccaccatgttga

SEQ ID NO: 253 - RNA, 21 nt, synthetic construct
  source 1..21: mol_type = other RNA
ccaccatgttgatccagccca

SEQ ID NO: 254 - RNA, 21 nt, synthetic construct
  source 1..21: mol_type = other RNA
gcagcacctgcgaattcagca

SEQ ID NO: 255 - RNA, 21 nt, synthetic construct
  source 1..21: mol_type = other RNA
agaactgcgccaagagcctct

SEQ ID NO: 256 - RNA, 21 nt, synthetic construct
  source 1..21: mol_type = other RNA
cctgcagccattccaacctca

SEQ ID NO: 257 - RNA, 21 nt, synthetic construct
  source 1..21: mol_type = other RNA
gcaggccaccaccatgttgat

SEQ ID NO: 258 - RNA, 21 nt, synthetic construct
  source 1..21: mol_type = other RNA
caactcaaggctcagaacagt

SEQ ID NO: 259 - RNA, 21 nt, synthetic construct
  source 1..21: mol_type = other RNA
cttccgctccatcccacagca

SEQ ID NO: 260 - RNA, 21 nt, synthetic construct
  source 1..21: mol_type = other RNA
ctcagaacagcaggatccagt

SEQ ID NO: 261 - RNA, 21 nt, synthetic construct
  source 1..21: mol_type = other RNA
ctcttccacaaggtggcccaa

SEQ ID NO: 262 - RNA, 21 nt, synthetic construct
  source 1..21: mol_type = other RNA
agagcctctctggaggctggt

SEQ ID NO: 263 - RNA, 21 nt, synthetic construct
  source 1..21: mol_type = other RNA
gagcctctctggaggctggta

SEQ ID NO: 264 - RNA, 21 nt, synthetic construct
  source 1..21: mol_type = other RNA
gctcagaacagcaggatccaa

SEQ ID NO: 265 - RNA, 21 nt, synthetic construct
  source 1..21: mol_type = other RNA
gaggctggtggtttggcacct

SEQ ID NO: 266 - RNA, 21 nt, synthetic construct
  source 1..21: mol_type = other RNA
gaactgcgccaagagcctctt

SEQ ID NO: 267 - RNA, 21 nt, synthetic construct
  source 1..21: mol_type = other RNA
aagaactgcgccaagagcctt

SEQ ID NO: 268 - RNA, 21 nt, synthetic construct
  source 1..21: mol_type = other RNA
cttcacagcctgcagacacaa

SEQ ID NO: 269 - RNA, 21 nt, synthetic construct
  source 1..21: mol_type = other RNA
tcacgacctccgcagggacaa

SEQ ID NO: 270 - RNA, 21 nt, synthetic construct
  source 1..21: mol_type = other RNA
agacacaactcaaggctcaga

SEQ ID NO: 271 - RNA, 21 nt, synthetic construct
  source 1..21: mol_type = other RNA
agaacagcaggatccagcaat

SEQ ID NO: 272 - RNA, 21 nt, synthetic construct
  source 1..21: mol_type = other RNA
gtggtttggcacctgcagcca

SEQ ID NO: 273 - RNA, 21 nt, synthetic construct
  source 1..21: mol_type = other RNA
ccacaaggtggcccagcagca

SEQ ID NO: 274 - RNA, 21 nt, synthetic construct
  source 1..21: mol_type = other RNA
cctccgcagggacaagaacta

SEQ ID NO: 275 - RNA, 21 nt, synthetic construct
  source 1..21: mol_type = other RNA
cgacctccgcagggacaagaa

SEQ ID NO: 276 - RNA, 21 nt, synthetic construct
  source 1..21: mol_type = other RNA
acaactcaaggctcagaacaa

SEQ ID NO: 277 - RNA, 21 nt, synthetic construct
  source 1..21: mol_type = other RNA
caagaactgcgccaagagcct

SEQ ID NO: 278 - RNA, 21 nt, synthetic construct
  source 1..21: mol_type = other RNA
acacaactcaaggctcagaat

SEQ ID NO: 279 - RNA, 21 nt, synthetic construct
  source 1..21: mol_type = other RNA
gctggtggtttggcacctgca

SEQ ID NO: 280 - RNA, 21 nt, synthetic construct
  source 1..21: mol_type = other RNA
gacctccgcagggacaagaat

SEQ ID NO: 281 - RNA, 21 nt, synthetic construct
  source 1..21: mol_type = other RNA
ctccgcagggacaagaactgt

SEQ ID NO: 282 - RNA, 21 nt, synthetic construct
  source 1..21: mol_type = other RNA
caaggctcagaacagcaggat

SEQ ID NO: 283 - RNA, 21 nt, synthetic construct
  source 1..21: mol_type = other RNA
aagcctgcccgaagaaagaga

SEQ ID NO: 284 - RNA, 21 nt, synthetic construct
  source 1..21: mol_type = other RNA
caagcctgcccgaagaaagaa

SEQ ID NO: 285 - RNA, 21 nt, synthetic construct
  source 1..21: mol_type = other RNA
gacacaactcaaggctcagaa

SEQ ID NO: 286 - RNA, 21 nt, synthetic construct
  source 1..21: mol_type = other RNA
agcctgcccgaagaaagaggt

SEQ ID NO: 287 - RNA, 21 nt, synthetic construct
  source 1..21: mol_type = other RNA
actcaaggctcagaacagcaa

SEQ ID NO: 288 - RNA, 21 nt, synthetic construct
  source 1..21: mol_type = other RNA
ggccaagcctgcccgaagaaa

SEQ ID NO: 289 - RNA, 21 nt, synthetic construct
  source 1..21: mol_type = other RNA
acagcaggatccagcaactct

SEQ ID NO: 290 - RNA, 21 nt, synthetic construct
  source 1..21: mol_type = other RNA
gccaagcctgcccgaagaaaa

SEQ ID NO: 291 - RNA, 21 nt, synthetic construct
  source 1..21: mol_type = other RNA
ccaagcctgcccgaagaaaga

SEQ ID NO: 292 - RNA, 21 nt, synthetic construct
  source 1..21: mol_type = other RNA
tcaaggctcagaacagcagga

SEQ ID NO: 293 - RNA, 21 nt, synthetic construct
  source 1..21: mol_type = other RNA
ggacaagaactgcgccaagaa

SEQ ID NO: 294 - RNA, 21 nt, synthetic construct
  source 1..21: mol_type = other RNA
ctcaaggctcagaacagcaga

SEQ ID NO: 295 - RNA, 21 nt, synthetic construct
  source 1..21: mol_type = other RNA
aacagcaggatccagcaactt

SEQ ID NO: 296 - RNA, 21 nt, synthetic construct
  source 1..21: mol_type = other RNA
gcctgcccgaagaaagaggct

SEQ ID NO: 297 - RNA, 21 nt, synthetic construct
  source 1..21: mol_type = other RNA
aagacggtgactcttggctct

SEQ ID NO: 298 - RNA, 21 nt, synthetic construct
  source 1..21: mol_type = other RNA
agacggtgactcttggctcta

SEQ ID NO: 299 - RNA, 21 nt, synthetic construct
  source 1..21: mol_type = other RNA
ttggctctgcccgaggatgta

SEQ ID NO: 300 - RNA, 21 nt, synthetic construct
  source 1..21: mol_type = other RNA
tggctctgcccgaggatgtga

SEQ ID NO: 301 - RNA, 21 nt, synthetic construct
  source 1..21: mol_type = other RNA
ccaaggaggggccatctggaa

SEQ ID NO: 302 - RNA, 21 nt, synthetic construct
  source 1..21: mol_type = other RNA
aggaggggccatctggaaact

SEQ ID NO: 303 - RNA, 21 nt, synthetic construct
  source 1..21: mol_type = other RNA
ggaggggccatctggaaactt

SEQ ID NO: 304 - RNA, 21 nt, synthetic construct
  source 1..21: mol_type = other RNA
gaggggccatctggaaactta

SEQ ID NO: 305 - RNA, 21 nt, synthetic construct
  source 1..21: mol_type = other RNA
gaaacttgtggacagagaaga

SEQ ID NO: 306 - RNA, 21 nt, synthetic construct
  source 1..21: mol_type = other RNA
tgtggacagagaagaagacca

SEQ ID NO: 307 - RNA, 21 nt, synthetic construct
  source 1..21: mol_type = other RNA
gaagaagaccacgactggaga

SEQ ID NO: 308 - RNA, 21 nt, synthetic construct
  source 1..21: mol_type = other RNA
aagaagaccacgactggagaa

SEQ ID NO: 309 - RNA, 21 nt, synthetic construct
  source 1..21: mol_type = other RNA
atgcgttgcctcctgagatca

SEQ ID NO: 310 - RNA, 21 nt, synthetic construct
  source 1..21: mol_type = other RNA
cctcctgagatcgaggctgca

SEQ ID NO: 311 - RNA, 21 nt, synthetic construct
  source 1..21: mol_type = other RNA
ctcctgagatcgaggctgcaa

SEQ ID NO: 312 - RNA, 21 nt, synthetic construct
  source 1..21: mol_type = other RNA
cctgagatcgaggctgcagga

SEQ ID NO: 313 - RNA, 21 nt, synthetic construct
  source 1..21: mol_type = other RNA
ctgagatcgaggctgcaggat

SEQ ID NO: 314 - RNA, 21 nt, synthetic construct
  source 1..21: mol_type = other RNA
tgagatcgaggctgcaggata

SEQ ID NO: 315 - RNA, 21 nt, synthetic construct
  source 1..21: mol_type = other RNA
aggcgtggaccaaggggcata

SEQ ID NO: 316 - RNA, 21 nt, synthetic construct
  source 1..21: mol_type = other RNA
ggaccaaggggcatggagctt

SEQ ID NO: 317 - RNA, 21 nt, synthetic construct
  source 1..21: mol_type = other RNA
gaccaaggggcatggagcttt

SEQ ID NO: 318 - RNA, 21 nt, synthetic construct
  source 1..21: mol_type = other RNA
accaaggggcatggagcttca

SEQ ID NO: 319 - RNA, 21 nt, synthetic construct
  source 1..21: mol_type = other RNA
ccaaggggcatggagcttcat

SEQ ID NO: 320 - RNA, 21 nt, synthetic construct
  source 1..21: mol_type = other RNA
caaggggcatggagcttcact

SEQ ID NO: 321 - RNA, 21 nt, synthetic construct
  source 1..21: mol_type = other RNA
aaggggcatggagcttcactt

SEQ ID NO: 322 - RNA, 21 nt, synthetic construct
  source 1..21: mol_type = other RNA
aggggcatggagcttcactct

SEQ ID NO: 323 - RNA, 21 nt, synthetic construct
  source 1..21: mol_type = other RNA
ggggcatggagcttcactcct

SEQ ID NO: 324 - RNA, 21 nt, synthetic construct
  source 1..21: mol_type = other RNA
gggcatggagcttcactcctt

SEQ ID NO: 325 - RNA, 21 nt, synthetic construct
  source 1..21: mol_type = other RNA
ggcatggagcttcactcctta

SEQ ID NO: 326 - RNA, 21 nt, synthetic construct
  source 1..21: mol_type = other RNA
gagcttcactccttgctggct

SEQ ID NO: 327 - RNA, 21 nt, synthetic construct
  source 1..21: mol_type = other RNA
agcttcactccttgctggcca

SEQ ID NO: 328 - RNA, 21 nt, synthetic construct
  source 1..21: mol_type = other RNA
ctccttgctggccagggagtt

SEQ ID NO: 329 - RNA, 21 nt, synthetic construct
  source 1..21: mol_type = other RNA
tccttgctggccagggagtta

SEQ ID NO: 330 - RNA, 21 nt, synthetic construct
  source 1..21: mol_type = other RNA
gccagggagttggggactcaa

SEQ ID NO: 331 - RNA, 21 nt, synthetic construct
  source 1..21: mol_type = other RNA
agggagttggggactcagaga

SEQ ID NO: 332 - RNA, 21 nt, synthetic construct
  source 1..21: mol_type = other RNA
ggagttggggactcagaggga

SEQ ID NO: 333 - RNA, 21 nt, synthetic construct
  source 1..21: mol_type = other RNA
gagttggggactcagagggat

SEQ ID NO: 334 - RNA, 21 nt, synthetic construct
  source 1..21: mol_type = other RNA
ttggggactcagagggaccat

SEQ ID NO: 335 - RNA, 21 nt, synthetic construct
  source 1..21: mol_type = other RNA
ctcagagggaccacttggggt

SEQ ID NO: 336 - RNA, 21 nt, synthetic construct
  source 1..21: mol_type = other RNA
aatggcggactcagtcacatt

SEQ ID NO: 337 - RNA, 21 nt, synthetic construct
  source 1..21: mol_type = other RNA
atggcggactcagtcacatta

SEQ ID NO: 338 - RNA, 21 nt, synthetic construct
  source 1..21: mol_type = other RNA
tggcggactcagtcacattga

SEQ ID NO: 339 - RNA, 21 nt, synthetic construct
  source 1..21: mol_type = other RNA
ggcggactcagtcacattgat

SEQ ID NO: 340 - RNA, 21 nt, synthetic construct
  source 1..21: mol_type = other RNA
gactcagtcacattgactgat

SEQ ID NO: 341 - RNA, 21 nt, synthetic construct
  source 1..21: mol_type = other RNA
actcagtcacattgactgaca

SEQ ID NO: 342 - RNA, 21 nt, synthetic construct
  source 1..21: mol_type = other RNA
gtcacattgactgacggggat

SEQ ID NO: 343 - RNA, 21 nt, synthetic construct
  source 1..21: mol_type = other RNA
cacattgactgacggggacca

SEQ ID NO: 344 - RNA, 21 nt, synthetic construct
  source 1..21: mol_type = other RNA
ctggtgctgttgtgtgtaggt

SEQ ID NO: 345 - RNA, 21 nt, synthetic construct
  source 1..21: mol_type = other RNA
tggtgctgttgtgtgtaggtt

SEQ ID NO: 346 - RNA, 21 nt, synthetic construct
  source 1..21: mol_type = other RNA
gctgttgtgtgtaggtcccct

SEQ ID NO: 347 - RNA, 21 nt, synthetic construct
  source 1..21: mol_type = other RNA
ctgttgtgtgtaggtccccta

SEQ ID NO: 348 - RNA, 21 nt, synthetic construct
  source 1..21: mol_type = other RNA
gttgtgtgtaggtcccctgga

SEQ ID NO: 349 - RNA, 21 nt, synthetic construct
  source 1..21: mol_type = other RNA
tgtgtgtaggtcccctgggga

SEQ ID NO: 350 - RNA, 21 nt, synthetic construct
  source 1..21: mol_type = other RNA
gtgtgtaggtcccctggggat

SEQ ID NO: 351 - RNA, 21 nt, synthetic construct
  source 1..21: mol_type = other RNA
acaagcaggcgccaatggtat

SEQ ID NO: 352 - RNA, 21 nt, synthetic construct
  source 1..21: mol_type = other RNA
aagcaggcgccaatggtatct

SEQ ID NO: 353 - RNA, 21 nt, synthetic construct
  source 1..21: mol_type = other RNA
ggcgccaatggtatctgggca

SEQ ID NO: 354 - RNA, 21 nt, synthetic construct
  source 1..21: mol_type = other RNA
agttcttggaataaaagcaat

SEQ ID NO: 355 - RNA, 21 nt, synthetic construct
  source 1..21: mol_type = other RNA
gttcttggaataaaagcaact

SEQ ID NO: 356 - RNA, 21 nt, synthetic construct
  source 1..21: mol_type = other RNA
ttcttggaataaaagcaacct

SEQ ID NO: 357 - RNA, 21 nt, synthetic construct
  source 1..21: mol_type = other RNA
tcttggaataaaagcaacctt

SEQ ID NO: 358 - RNA, 21 nt, synthetic construct
  source 1..21: mol_type = other RNA
ggaataaaagcaacctcagaa

SEQ ID NO: 359 - RNA, 21 nt, synthetic construct
  source 1..21: mol_type = other RNA
gaataaaagcaacctcagaat

SEQ ID NO: 360 - RNA, 21 nt, synthetic construct
  source 1..21: mol_type = other RNA
aataaaagcaacctcagaaca

SEQ ID NO: 361 - RNA, 21 nt, synthetic construct
  source 1..21: mol_type = other RNA
gtcccaggcccacgaaagaca

SEQ ID NO: 362 - RNA, 21 nt, synthetic construct
  source 1..21: mol_type = other RNA
aggcccacgaaagacggtgat

SEQ ID NO: 363 - RNA, 21 nt, synthetic construct
  source 1..21: mol_type = other RNA
ggcccacgaaagacggtgact

SEQ ID NO: 364 - RNA, 21 nt, synthetic construct
  source 1..21: mol_type = other RNA
gcccacgaaagacggtgactt

SEQ ID NO: 365 - RNA, 21 nt, synthetic construct
  source 1..21: mol_type = other RNA
gaaagacggtgactcttggct

SEQ ID NO: 366 - RNA, 21 nt, synthetic construct
  source 1..21: mol_type = other RNA
aaagacggtgactcttggctt

SEQ ID NO: 367 - RNA, 21 nt, synthetic construct
  source 1..21: mol_type = other RNA
caaggaggggccatctggaaa

SEQ ID NO: 368 - RNA, 21 nt, synthetic construct
  source 1..21: mol_type = other RNA
ggccatctggaaacttgtgga

SEQ ID NO: 369 - RNA, 21 nt, synthetic construct
  source 1..21: mol_type = other RNA
ccatctggaaacttgtggaca

SEQ ID NO: 370 - RNA, 21 nt, synthetic construct
  source 1..21: mol_type = other RNA
ggaaacttgtggacagagaaa

SEQ ID NO: 371 - RNA, 21 nt, synthetic construct
  source 1..21: mol_type = other RNA
aaacttgtggacagagaagaa

SEQ ID NO: 372 - RNA, 21 nt, synthetic construct
  source 1..21: mol_type = other RNA
aacttgtggacagagaagaaa

SEQ ID NO: 373 - RNA, 21 nt, synthetic construct
  source 1..21: mol_type = other RNA
gtggacagagaagaagaccat

SEQ ID NO: 374 - RNA, 21 nt, synthetic construct
  source 1..21: mol_type = other RNA
gaagaccacgactggagaagt

SEQ ID NO: 375 - RNA, 21 nt, synthetic construct
  source 1..21: mol_type = other RNA
gctgcaggatatgctcagact

SEQ ID NO: 376 - RNA, 21 nt, synthetic construct
  source 1..21: mol_type = other RNA
tcagactctagaggcgtggat

SEQ ID NO: 377 - RNA, 21 nt, synthetic construct
  source 1..21: mol_type = other RNA
cagactctagaggcgtggact

SEQ ID NO: 378 - RNA, 21 nt, synthetic construct
  source 1..21: mol_type = other RNA
agactctagaggcgtggacca

SEQ ID NO: 379 - RNA, 21 nt, synthetic construct
  source 1..21: mol_type = other RNA
gactctagaggcgtggaccaa

SEQ ID NO: 380 - RNA, 21 nt, synthetic construct
  source 1..21: mol_type = other RNA
actctagaggcgtggaccaaa

SEQ ID NO: 381 - RNA, 21 nt, synthetic construct
  source 1..21: mol_type = other RNA
actccttgctggccagggagt

SEQ ID NO: 382 - RNA, 21 nt, synthetic construct
  source 1..21: mol_type = other RNA
gggagttggggactcagagga

SEQ ID NO: 383 - RNA, 21 nt, synthetic construct
  source 1..21: mol_type = other RNA
tcagagggaccacttggggct

SEQ ID NO: 384 - RNA, 21 nt, synthetic construct
  source 1..21: mol_type = other RNA
cacttggggccagccagacta

SEQ ID NO: 385 - RNA, 21 nt, synthetic construct
  source 1..21: mol_type = other RNA
tggcctcaatggcggactcaa

SEQ ID NO: 386 - RNA, 21 nt, synthetic construct
  source 1..21: mol_type = other RNA
ggcctcaatggcggactcagt

SEQ ID NO: 387 - RNA, 21 nt, synthetic construct
  source 1..21: mol_type = other RNA
gcctcaatggcggactcagtt

SEQ ID NO: 388 - RNA, 21 nt, synthetic construct
  source 1..21: mol_type = other RNA
tcagtcacattgactgacgga

SEQ ID NO: 389 - RNA, 21 nt, synthetic construct
  source 1..21: mol_type = other RNA
tgactgacggggaccagggct

SEQ ID NO: 390 - RNA, 21 nt, synthetic construct
  source 1..21: mol_type = other RNA
gtgctggtgctgttgtgtgta

SEQ ID NO: 391 - RNA, 21 nt, synthetic construct
  source 1..21: mol_type = other RNA
agcaggcgccaatggtatcta

SEQ ID NO: 392 - RNA, 21 nt, synthetic construct
  source 1..21: mol_type = other RNA
tggtatctgggcggagctcat

SEQ ID NO: 393 - RNA, 21 nt, synthetic construct
  source 1..21: mol_type = other RNA
aaggaggggccatctggaaat

SEQ ID NO: 394 - RNA, 21 nt, synthetic construct
  source 1..21: mol_type = other RNA
aggggccatctggaaacttgt

SEQ ID NO: 395 - RNA, 21 nt, synthetic construct
  source 1..21: mol_type = other RNA
catctggaaacttgtggacaa

SEQ ID NO: 396 - RNA, 21 nt, synthetic construct
  source 1..21: mol_type = other RNA
tggaaacttgtggacagagaa

SEQ ID NO: 397 - RNA, 21 nt, synthetic construct
  source 1..21: mol_type = other RNA
tggacagagaagaagaccaca

SEQ ID NO: 398 - RNA, 21 nt, synthetic construct
  source 1..21: mol_type = other RNA
gagaagaagaccacgactgga

SEQ ID NO: 399 - RNA, 21 nt, synthetic construct
  source 1..21: mol_type = other RNA
agaagaagaccacgactggaa

SEQ ID NO: 400 - RNA, 21 nt, synthetic construct
  source 1..21: mol_type = other RNA
accacgactggagaagcccct

SEQ ID NO: 401 - RNA, 21 nt, synthetic construct
  source 1..21: mol_type = other RNA
aggctgcaggatatgctcaga

SEQ ID NO: 402 - RNA, 21 nt, synthetic construct
  source 1..21: mol_type = other RNA
gcttcactccttgctggccaa

SEQ ID NO: 403 - RNA, 21 nt, synthetic construct
  source 1..21: mol_type = other RNA
cactccttgctggccagggaa

SEQ ID NO: 404 - RNA, 21 nt, synthetic construct
  source 1..21: mol_type = other RNA
gctggccagggagttggggat

SEQ ID NO: 405 - RNA, 21 nt, synthetic construct
  source 1..21: mol_type = other RNA
cagggagttggggactcagaa

SEQ ID NO: 406 - RNA, 21 nt, synthetic construct
  source 1..21: mol_type = other RNA
gttggggactcagagggacca

SEQ ID NO: 407 - RNA, 21 nt, synthetic construct
  source 1..21: mol_type = other RNA
tggggactcagagggaccact

SEQ ID NO: 408 - RNA, 21 nt, synthetic construct
  source 1..21: mol_type = other RNA
ggggactcagagggaccactt

SEQ ID NO: 409 - RNA, 21 nt, synthetic construct
  source 1..21: mol_type = other RNA
gggactcagagggaccactta

SEQ ID NO: 410 - RNA, 21 nt, synthetic construct
  source 1..21: mol_type = other RNA
gccagactggcctcaatggca

SEQ ID NO: 411 - RNA, 21 nt, synthetic construct
  source 1..21: mol_type = other RNA
ccagactggcctcaatggcga

SEQ ID NO: 412 - RNA, 21 nt, synthetic construct
  source 1..21: mol_type = other RNA
attgactgacggggaccagga

SEQ ID NO: 413 - RNA, 21 nt, synthetic construct
  source 1..21: mol_type = other RNA
actgacggggaccagggctta

SEQ ID NO: 414 - RNA, 21 nt, synthetic construct
  source 1..21: mol_type = other RNA
ggtcccctggggacacaagca

SEQ ID NO: 415 - RNA, 21 nt, synthetic construct
  source 1..21: mol_type = other RNA
gtcccctggggacacaagcaa

SEQ ID NO: 416 - RNA, 21 nt, synthetic construct
  source 1..21: mol_type = other RNA
ggtatctgggcggagctcaca

SEQ ID NO: 417 - RNA, 21 nt, synthetic construct
  source 1..21: mol_type = other RNA
gtatctgggcggagctcacaa

SEQ ID NO: 418 - RNA, 21 nt, synthetic construct
  source 1..21: mol_type = other RNA
tatctgggcggagctcacaga

SEQ ID NO: 419 - RNA, 21 nt, synthetic construct
  source 1..21: mol_type = other RNA
cggagctcacagagttcttga

SEQ ID NO: 420 - RNA, 19 nt, synthetic construct
  source 1..19: mol_type = other RNA
ttcttggaataaaagcaat

SEQ ID NO: 421 - RNA, 20 nt, synthetic construct
  source 1..20: mol_type = other RNA
gttcttggaataaaagcaat

SEQ ID NO: 422 - RNA, 21 nt, synthetic construct
  source 1..21: mol_type = other RNA
  modified_base 1: mod_base = OTHER; note = 2'-O- methyl
  modified_base 2: mod_base = gm
  modified_base 3: mod_base = um
  modified_base 4: mod_base = um
  modified_base 5: mod_base = cm
  modified_base 6: mod_base = um
  modified_base 7: mod_base = OTHER; note = 2'- fluoro
  modified_base 8: mod_base = gm
  modified_base 9: mod_base = OTHER; note = 2'- fluoro
  modified_base 10: mod_base = OTHER; note = 2'- fluoro
  modified_base 11: mod_base = OTHER; note = 2'- fluoro
  modified_base 12: mod_base = um
  modified_base 13: mod_base = OTHER; note = 2'-O- methyl
  modified_base 14: mod_base = OTHER; note = 2'-O- methyl
  modified_base 15: mod_base = OTHER; note = 2'-O- methyl
  modified_base 16: mod_base = OTHER; note = 2'-O- methyl
  modified_base 17: mod_base = gm
  modified_base 18: mod_base = cm
  modified_base 19: mod_base = OTHER; note = 2'-O- methyl
  modified_base 20: mod_base = OTHER; note = 2'-O- methyl
  modified_base 21: mod_base = um
agttcttggaataaaagcaat

SEQ ID NO: 423 - RNA, 23 nt, synthetic construct
  source 1..23: mol_type = other RNA
  modified_base 1: mod_base = OTHER; note = 2'-O- methyl
  modified_base 2: mod_base = OTHER; note = 2'- fluoro
  modified_base 3: mod_base = um
  modified_base 4: mod_base = gm
  modified_base 5: mod_base = cm
  modified_base 6: mod_base = OTHER; note = 2'- fluoro
  modified_base 7: mod_base = um
  modified_base 8: mod_base = um
  modified_base 9: mod_base = um
  modified_base 10: mod_base = OTHER; note = 2'-O- methyl
  modified_base 11: mod_base = um
  modified_base 12: mod_base = um
  modified_base 13: mod_base = cm
  modified_base 14: mod_base = OTHER; note = 2'- fluoro
  modified_base 15: mod_base = OTHER; note = 2'-O- methyl
  modified_base 16: mod_base = OTHER; note = 2'- fluoro
  modified_base 17: mod_base = gm
  modified_base 18: mod_base = OTHER; note = 2'-O- methyl
  modified_base 19: mod_base = OTHER; note = 2'-O- methyl
  modified_base 20: mod_base = cm
  modified_base 21: mod_base = um
  modified_base 22: mod_base = cm
  modified_base 23: mod_base = um
attgcttttattccaagaactct

SEQ ID NO: 424 - RNA, 21 nt, synthetic construct
  source 1..21: mol_type = other RNA
  modified_base 1: mod_base = gm
  modified_base 2: mod_base = um
  modified_base 3: mod_base = um
  modified_base 4: mod_base = cm
  modified_base 5: mod_base = um
  modified_base 6: mod_base = um
  modified_base 7: mod_base = OTHER; note = 2'- fluoro
  modified_base 8: mod_base = gm
  modified_base 9: mod_base = OTHER; note = 2'- fluoro
  modified_base 10: mod_base = OTHER; note = 2'- fluoro
  modified_base 11: mod_base = OTHER; note = 2'- fluoro
  modified_base 12: mod_base = OTHER; note = 2'-O- methyl
  modified_base 13: mod_base = OTHER; note = 2'-O- methyl
  modified_base 14: mod_base = OTHER; note = 2'-O- methyl
  modified_base 15: mod_base = OTHER; note = 2'-O- methyl
  modified_base 16: mod_base = gm
  modified_base 17: mod_base = cm
  modified_base 18: mod_base = OTHER; note = 2'-O- methyl
  modified_base 19: mod_base = OTHER; note = 2'-O- methyl
  modified_base 20: mod_base = cm
  modified_base 21: mod_base = um
  misc_binding 21: bound_moiety = L96
gttcttggaataaaagcaact

SEQ ID NO: 425 - RNA, 23 nt, synthetic construct
  source 1..23: mol_type = other RNA
  modified_base 1: mod_base = OTHER; note = 2'-O- methyl
  modified_base 2: mod_base = OTHER; note = 2'- fluoro
  modified_base 3: mod_base = um
  modified_base 4: mod_base = um
  modified_base 5: mod_base = gm
  modified_base 6: mod_base = OTHER; note = 2'- fluoro
  modified_base 7: mod_base = um
  modified_base 8: mod_base = um
  modified_base 9: mod_base = um
  modified_base 10: mod_base = um
  modified_base 11: mod_base = OTHER; note = 2'-O- methyl
  modified_base 12: mod_base = um
  modified_base 13: mod_base = um
  modified_base 14: mod_base = OTHER; note = 2'- fluoro
  modified_base 15: mod_base = cm
  modified_base 16: mod_base = OTHER; note = 2'- fluoro
  modified_base 17: mod_base = OTHER; note = 2'-O- methyl
  modified_base 18: mod_base = gm
  modified_base 19: mod_base = OTHER; note = 2'-O- methyl
  modified_base 20: mod_base = OTHER; note = 2'-O- methyl
  modified_base 21: mod_base = cm
  modified_base 22: mod_base = um
  modified_base 23: mod_base = cm
agttgcttttattccaagaactc

SEQ ID NO: 426 - RNA, 21 nt, synthetic construct
  source 1..21: mol_type = other RNA
  modified_base 1: mod_base = um
  modified_base 2: mod_base = cm
  modified_base 3: mod_base = um
  modified_base 4: mod_base = um
  modified_base 5: mod_base = gm
  modified_base 6: mod_base = gm
  modified_base 7: mod_base = OTHER; note = 2'- fluoro
  modified_base 8: mod_base = OTHER; note = 2'-O- methyl
  modified_base 9: mod_base = OTHER; note = 2'- fluoro
  modified_base 10: mod_base = OTHER; note = 2'- fluoro
  modified_base 11: mod_base = OTHER; note = 2'- fluoro
  modified_base 12: mod_base = OTHER; note = 2'-O- methyl
  modified_base 13: mod_base = OTHER; note = 2'-O- methyl
  modified_base 14: mod_base = gm
  modified_base 15: mod_base = cm
  modified_base 16: mod_base = OTHER; note = 2'-O- methyl
  modified_base 17: mod_base = OTHER; note = 2'-O- methyl
  modified_base 18: mod_base = cm
  modified_base 19: mod_base = cm
  modified_base 20: mod_base = um
  modified_base 21: mod_base = um
  misc_binding 21: bound_moiety = L96
tcttggaataaaagcaacctt

SEQ ID NO: 427 - RNA, 23 nt, synthetic construct
  source 1..23: mol_type = other RNA
  modified_base 1: mod_base = OTHER; note = 2'-O- methyl
  modified_base 2: mod_base = OTHER; note = 2'- fluoro
  modified_base 3: mod_base = gm
  modified_base 4: mod_base = gm
  modified_base 5: mod_base = um
  modified_base 6: mod_base = OTHER; note = 2'- fluoro
  modified_base 7: mod_base = gm
  modified_base 8: mod_base = cm
  modified_base 9: mod_base = um
  modified_base 10: mod_base = um
  modified_base 11: mod_base = um
  modified_base 12: mod_base = um
  modified_base 13: mod_base = OTHER; note = 2'-O- methyl
  modified_base 14: mod_base = OTHER; note = 2'- fluoro
  modified_base 15: mod_base = um
  modified_base 16: mod_base = OTHER; note = 2'- fluoro
  modified_base 17: mod_base = cm
  modified_base 18: mod_base = OTHER; note = 2'-O- methyl
  modified_base 19: mod_base = OTHER; note = 2'-O- methyl
  modified_base 20: mod_base = gm
  modified_base 21: mod_base = OTHER; note = 2'-O- methyl
  modified_base 22: mod_base = OTHER; note = 2'-O- methyl
  modified_base 23: mod_base = cm
aaggttgcttttattccaagaac

SEQ ID NO: 428 - RNA, 21 nt, synthetic construct
  source 1..21: mol_type = other RNA
  modified_base 1: mod_base = gm
  modified_base 2: mod_base = gm
  modified_base 3: mod_base = OTHER; note = 2'-O- methyl
  modified_base 4: mod_base = OTHER; note = 2'-O- methyl
  modified_base 5: mod_base = um
  modified_base 6: mod_base = OTHER; note = 2'-O- methyl
  modified_base 7: mod_base = OTHER; note = 2'- fluoro
  modified_base 8: mod_base = OTHER; note = 2'-O- methyl
  modified_base 9: mod_base = OTHER; note = 2'- fluoro
  modified_base 10: mod_base = OTHER; note = 2'- fluoro
  modified_base 11: mod_base = OTHER; note = 2'- fluoro
  modified_base 12: mod_base = OTHER; note = 2'-O- methyl
  modified_base 13: mod_base = OTHER; note = 2'-O- methyl
  modified_base 14: mod_base = cm
  modified_base 15: mod_base = cm
  modified_base 16: mod_base = um
  modified_base 17: mod_base = cm
  modified_base 18: mod_base = OTHER; note = 2'-O- methyl
  modified_base 19: mod_base = gm
  modified_base 20: mod_base = OTHER; note = 2'-O- methyl
  modified_base 21: mod_base = OTHER; note = 2'-O- methyl
  misc_binding 21: bound_moiety = L96
ggaataaaagcaacctcagaa

SEQ ID NO: 429 - RNA, 23 nt, synthetic construct
  source 1..23: mol_type = other RNA
  modified_base 1: mod_base = um
  modified_base 2: mod_base = OTHER; note = 2'- fluoro
  modified_base 3: mod_base = cm
  modified_base 4: mod_base = um
  modified_base 5: mod_base = gm
  modified_base 6: mod_base = OTHER; note = 2'- fluoro
  modified_base 7: mod_base = gm
  modified_base 8: mod_base = gm
  modified_base 9: mod_base = um
  modified_base 10: mod_base = um
  modified_base 11: mod_base = gm
  modified_base 12: mod_base = cm
  modified_base 13: mod_base = um
  modified_base 14: mod_base = OTHER; note = 2'- fluoro
  modified_base 15: mod_base = um
  modified_base 16: mod_base = OTHER; note = 2'- fluoro
  modified_base 17: mod_base = OTHER; note = 2'-O- methyl
  modified_base 18: mod_base = um
  modified_base 19: mod_base = um
  modified_base 20: mod_base = cm
  modified_base 21: mod_base = cm
  modified_base 22: mod_base = OTHER; note = 2'-O- methyl
  modified_base 23: mod_base = OTHER; note = 2'-O- methyl
ttctgaggttgcttttattccaa

SEQ ID NO: 430 - RNA, 23 nt, synthetic construct
  source 1..23: mol_type = other RNA
  modified_base 1: mod_base = OTHER; note = 2'-O- methyl
  modified_base 2: mod_base = OTHER; note = 2'- fluoro
  modified_base 3: mod_base = um
  modified_base 4: mod_base = gm
  modified_base 5: mod_base = cm
  modified_base 6: mod_base = OTHER; note = 2'- fluoro
  modified_base 7: mod_base = um
  modified_base 8: mod_base = OTHER; note = 2'- fluoro
  modified_base 9: mod_base = OTHER; note = 2'- fluoro
  modified_base 10: mod_base = OTHER; note = 2'-O- methyl
  modified_base 11: mod_base = um
  modified_base 12: mod_base = um
  modified_base 13: mod_base = cm
  modified_base 14: mod_base = OTHER; note = 2'- fluoro
  modified_base 15: mod_base = OTHER; note = 2'-O- methyl
  modified_base 16: mod_base = OTHER; note = 2'- fluoro
  modified_base 17: mod_base = gm
  modified_base 18: mod_base = OTHER; note = 2'-O- methyl
  modified_base 19: mod_base = OTHER; note = 2'-O- methyl
  modified_base 20: mod_base = cm
  modified_base 21: mod_base = um
  modified_base 22: mod_base = cm
  modified_base 23: mod_base = um
attgcttttattccaagaactct

SEQ ID NO: 431 - RNA, 23 nt, synthetic construct
  source 1..23: mol_type = other RNA
  modified_base 1: mod_base = OTHER; note = 2'-O- methyl
  modified_base 2: mod_base = OTHER; note = 2'- fluoro
  modified_base 3: mod_base = um
  modified_base 4: mod_base = um
  modified_base 5: mod_base = gm
  modified_base 6: mod_base = OTHER; note = 2'- fluoro
  modified_base 7: mod_base = um
  modified_base 8: mod_base = OTHER; note = 2'- fluoro
  modified_base 9: mod_base = OTHER; note = 2'- fluoro
  modified_base 10: mod_base = um
  modified_base 11: mod_base = OTHER; note = 2'-O- methyl
  modified_base 12: mod_base = um
  modified_base 13: mod_base = um
  modified_base 14: mod_base = OTHER; note = 2'- fluoro
  modified_base 15: mod_base = cm
  modified_base 16: mod_base = OTHER; note = 2'- fluoro
  modified_base 17: mod_base = OTHER; note = 2'-O- methyl
  modified_base 18: mod_base = gm
  modified_base 19: mod_base = OTHER; note = 2'-O- methyl
  modified_base 20: mod_base = OTHER; note = 2'-O- methyl
  modified_base 21: mod_base = cm
  modified_base 22: mod_base = um
  modified_base 23: mod_base = cm
agttgcttttattccaagaactc

SEQ ID NO: 432 - RNA, 23 nt, synthetic construct
  source 1..23: mol_type = other RNA
  modified_base 1: mod_base = OTHER; note = 2'-O- methyl
  modified_base 2: mod_base = OTHER; note = 2'- fluoro
  modified_base 3: mod_base = gm
  modified_base 4: mod_base = gm
  modified_base 5: mod_base = um
  modified_base 6: mod_base = OTHER; note = 2'- fluoro
  modified_base 7: mod_base = gm
  modified_base 8: mod_base = OTHER; note = 2'- fluoro
  modified_base 9: mod_base = OTHER; note = 2'- fluoro
  modified_base 10: mod_base = um
  modified_base 11: mod_base = um
  modified_base 12: mod_base = um
  modified_base 13: mod_base = OTHER; note = 2'-O- methyl
  modified_base 14: mod_base = OTHER; note = 2'- fluoro
  modified_base 15: mod_base = um
  modified_base 16: mod_base = OTHER; note = 2'- fluoro
  modified_base 17: mod_base = cm
  modified_base 18: mod_base = OTHER; note = 2'-O- methyl
  modified_base 19: mod_base = OTHER; note = 2'-O- methyl
  modified_base 20: mod_base = gm
  modified_base 21: mod_base = OTHER; note = 2'-O- methyl
  modified_base 22: mod_base = OTHER; note = 2'-O- methyl
  modified_base 23: mod_base = cm
aaggttgcttttattccaagaac

SEQ ID NO: 433 - RNA, 23 nt, synthetic construct
  source 1..23: mol_type = other RNA
  modified_base 1: mod_base = um
  modified_base 2: mod_base = OTHER; note = 2'- fluoro
  modified_base 3: mod_base = cm
  modified_base 4: mod_base = um
  modified_base 5: mod_base = gm
  modified_base 6: mod_base = OTHER; note = 2'- fluoro
  modified_base 7: mod_base = gm
  modified_base 8: mod_base = OTHER; note = 2'- fluoro
  modified_base 9: mod_base = OTHER; note = 2'- fluoro
  modified_base 10: mod_base = um
  modified_base 11: mod_base = gm
  modified_base 12: mod_base = cm
  modified_base 13: mod_base = um
  modified_base 14: mod_base = OTHER; note = 2'- fluoro
  modified_base 15: mod_base = um
  modified_base 16: mod_base = OTHER; note = 2'- fluoro
  modified_base 17: mod_base = OTHER; note = 2'-O- methyl
  modified_base 18: mod_base = um
  modified_base 19: mod_base = um
  modified_base 20: mod_base = cm
  modified_base 21: mod_base = cm
  modified_base 22: mod_base = OTHER; note = 2'-O- methyl
  modified_base 23: mod_base = OTHER; note = 2'-O- methyl
ttctgaggttgcttttattccaa

SEQ ID NO: 434 - RNA, 21 nt, synthetic construct
  source 1..21: mol_type = other RNA
  modified_base 1: mod_base = gm
  modified_base 2: mod_base = OTHER; note = 2'-O- methyl
  modified_base 3: mod_base = OTHER; note = 2'-O- methyl
  modified_base 4: mod_base = um
  modified_base 5: mod_base = OTHER; note = 2'-O- methyl
  modified_base 6: mod_base = OTHER; note = 2'-O- methyl
  modified_base 7: mod_base = OTHER; note = 2'- fluoro
  modified_base 8: mod_base = OTHER; note = 2'-O- methyl
  modified_base 9: mod_base = OTHER; note = 2'- fluoro
  modified_base 10: mod_base = OTHER; note = 2'- fluoro
  modified_base 11: mod_base = OTHER; note = 2'- fluoro
  modified_base 12: mod_base = OTHER; note = 2'-O- methyl
  modified_base 13: mod_base = cm
  modified_base 14: mod_base = cm
  modified_base 15: mod_base = um
  modified_base 16: mod_base = cm
  modified_base 17: mod_base = OTHER; note = 2'-O- methyl
  modified_base 18: mod_base = gm
  modified_base 19: mod_base = OTHER; note = 2'-O- methyl
  modified_base 20: mod_base = OTHER; note = 2'-O- methyl
  modified_base 21: mod_base = um
  misc_binding 21: bound_moiety = L96
gaataaaagcaacctcagaat

SEQ ID NO: 435 - RNA, 23 nt, synthetic construct
  source 1..23: mol_type = other RNA
  modified_base 1: mod_base = OTHER; note = 2'-O- methyl
  modified_base 2: mod_base = OTHER; note = 2'- fluoro
  modified_base 3: mod_base = um
  modified_base 4: mod_base = cm
  modified_base 5: mod_base = um
  modified_base 6: mod_base = OTHER; note = 2'- fluoro
  modified_base 7: mod_base = OTHER; note = 2'-O- methyl
  modified_base 8: mod_base = OTHER; note = 2'- fluoro
  modified_base 9: mod_base = OTHER; note = 2'- fluoro
  modified_base 10: mod_base = um
  modified_base 11: mod_base = um
  modified_base 12: mod_base = gm
  modified_base 13: mod_base = cm
  modified_base 14: mod_base = OTHER; note = 2'- fluoro
  modified_base 15: mod_base = um
  modified_base 16: mod_base = OTHER; note = 2'- fluoro
  modified_base 17: mod_base = um
  modified_base 18: mod_base = OTHER; note = 2'-O- methyl
  modified_base 19: mod_base = um
  modified_base 20: mod_base = um
  modified_base 21: mod_base = cm
  modified_base 22: mod_base = cm
  modified_base 23: mod_base = OTHER; note = 2'-O- methyl
attctgaggttgcttttattcca

SEQ ID NO: 436 - RNA, 21 nt, synthetic construct
  source 1..21: mol_type = other RNA
  modified_base 1: mod_base = OTHER; note = 2'-O- methyl
  modified_base 2: mod_base = OTHER; note = 2'-O- methyl
  modified_base 3: mod_base = um
  modified_base 4: mod_base = OTHER; note = 2'-O- methyl
  modified_base 5: mod_base = OTHER; note = 2'-O- methyl
  modified_base 6: mod_base = OTHER; note = 2'-O- methyl
  modified_base 7: mod_base = OTHER; note = 2'- fluoro
  modified_base 8: mod_base = gm
  modified_base 9: mod_base = OTHER; note = 2'- fluoro
  modified_base 10: mod_base = OTHER; note = 2'- fluoro
  modified_base 11: mod_base = OTHER; note = 2'- fluoro
  modified_base 12: mod_base = cm
  modified_base 13: mod_base = cm
  modified_base 14: mod_base = um
  modified_base 15: mod_base = cm
  modified_base 16: mod_base = OTHER; note = 2'-O- methyl
  modified_base 17: mod_base = gm
  modified_base 18: mod_base = OTHER; note = 2'-O- methyl
  modified_base 19: mod_base = OTHER; note = 2'-O- methyl
  modified_base 20: mod_base = cm
  modified_base 21: mod_base = OTHER; note = 2'-O- methyl
  misc_binding 21: bound_moiety = L96
aataaaagcaacctcagaaca

SEQ ID NO: 437 - RNA, 23 nt, synthetic construct
  source 1..23: mol_type = other RNA
  modified_base 1: mod_base = um
  modified_base 2: mod_base = OTHER; note = 2'- fluoro
  modified_base 3: mod_base = um
  modified_base 4: mod_base = um
  modified_base 5: mod_base = cm
  modified_base 6: mod_base = OTHER; note = 2'- fluoro
  modified_base 7: mod_base = gm
  modified_base 8: mod_base = OTHER; note = 2'- fluoro
  modified_base 9: mod_base = OTHER; note = 2'- fluoro
  modified_base 10: mod_base = gm
  modified_base 11: mod_base = um
  modified_base 12: mod_base = um
  modified_base 13: mod_base = gm
  modified_base 14: mod_base = OTHER; note = 2'- fluoro
  modified_base 15: mod_base = um
  modified_base 16: mod_base = OTHER; note = 2'- fluoro
  modified_base 17: mod_base = um
  modified_base 18: mod_base = um
  modified_base 19: mod_base = OTHER; note = 2'-O- methyl
  modified_base 20: mod_base = um
  modified_base 21: mod_base = um
  modified_base 22: mod_base = cm
  modified_base 23: mod_base = cm
tgttctgaggttgcttttattcc

SEQ ID NO: 438 - RNA, 23 nt, synthetic construct
  source 1..23: mol_type = other RNA
  modified_base 1: mod_base = OTHER; note = 2'-O- methyl
  modified_base 2: mod_base = OTHER; note = 2'- fluoro
  modified_base 3: mod_base = um
  modified_base 4: mod_base = cm
  modified_base 5: mod_base = um
  modified_base 6: mod_base = OTHER; note = 2'- fluoro
  modified_base 7: mod_base = OTHER; note = 2'-O- methyl
  modified_base 8: mod_base = gm
  modified_base 9: mod_base = gm
  modified_base 10: mod_base = um
  modified_base 11: mod_base = um
  modified_base 12: mod_base = gm
  modified_base 13: mod_base = cm
  modified_base 14: mod_base = OTHER; note = 2'- fluoro
  modified_base 15: mod_base = um
  modified_base 16: mod_base = OTHER; note = 2'- fluoro
  modified_base 17: mod_base = um
  modified_base 18: mod_base = OTHER; note = 2'-O- methyl
  modified_base 19: mod_base = um
  modified_base 20: mod_base = um
  modified_base 21: mod_base = cm
  modified_base 22: mod_base = cm
  modified_base 23: mod_base = OTHER; note = 2'-O- methyl
attctgaggttgcttttattcca

SEQ ID NO: 439 - RNA, 23 nt, synthetic construct
  source 1..23: mol_type = other RNA
  modified_base 1: mod_base = um
  modified_base 2: mod_base = OTHER; note = 2'- fluoro
  modified_base 3: mod_base = um
  modified_base 4: mod_base = um
  modified_base 5: mod_base = cm
  modified_base 6: mod_base = OTHER; note = 2'- fluoro
  modified_base 7: mod_base = gm
  modified_base 8: mod_base = OTHER; note = 2'-O- methyl
  modified_base 9: mod_base = gm
  modified_base 10: mod_base = gm
  modified_base 11: mod_base = um
  modified_base 12: mod_base = um
  modified_base 13: mod_base = gm
  modified_base 14: mod_base = OTHER; note = 2'- fluoro
  modified_base 15: mod_base = um
  modified_base 16: mod_base = OTHER; note = 2'- fluoro
  modified_base 17: mod_base = um
  modified_base 18: mod_base = um
  modified_base 19: mod_base = OTHER; note = 2'-O- methyl
  modified_base 20: mod_base = um
  modified_base 21: mod_base = um
  modified_base 22: mod_base = cm
  modified_base 23: mod_base = cm
tgttctgaggttgcttttattcc

SEQ ID NO: 440 - RNA, 21 nt, synthetic construct
  source 1..21: mol_type = other RNA
  modified_base 1: mod_base = OTHER; note = 2'-O- methyl
  modified_base 2: mod_base = gm
  modified_base 3: mod_base = um
  modified_base 4: mod_base = um
  modified_base 5: mod_base = cm
  modified_base 6: mod_base = um
  modified_base 7: mod_base = OTHER; note = 2'- fluoro
  modified_base 8: mod_base = gm
  modified_base 9: mod_base = OTHER; note = 2'- fluoro
  modified_base 10: mod_base = OTHER; note = 2'- fluoro
  modified_base 11: mod_base = OTHER; note = 2'- fluoro
  modified_base 12: mod_base = um
  modified_base 13: mod_base = OTHER; note = 2'-O- methyl
  modified_base 14: mod_base = OTHER; note = 2'-O- methyl
  modified_base 15: mod_base = OTHER; note = 2'-O- methyl
  modified_base 16: mod_base = OTHER; note = 2'-O- methyl
  modified_base 17: mod_base = gm
  modified_base 18: mod_base = cm
  modified_base 19: mod_base = OTHER; note = 2'-O- methyl
  modified_base 20: mod_base = OTHER; note = 2'-O- methyl
  modified_base 21: mod_base = um
  misc_binding 21: bound_moiety = L96
agttcttggaataaaagcaat

SEQ ID NO: 441 - RNA, 23 nt, synthetic construct
  source 1..23: mol_type = other RNA
  modified_base 1: mod_base = OTHER; note = 2'-O- methyl
  modified_base 2: mod_base = OTHER; note = 2'- fluoro
  modified_base 3: mod_base = um
  modified_base 4: mod_base = gm
  modified_base 5: mod_base = cm
  modified_base 6: mod_base = OTHER; note = 2'- fluoro
  modified_base 7: mod_base = um
  modified_base 8: mod_base = um
  modified_base 9: mod_base = um
  modified_base 10: mod_base = OTHER; note = 2'- fluoro
  modified_base 11: mod_base = um
  modified_base 12: mod_base = um
  modified_base 13: mod_base = cm
  modified_base 14: mod_base = OTHER; note = 2'- fluoro
  modified_base 15: mod_base = OTHER; note = 2'-O- methyl
  modified_base 16: mod_base = OTHER; note = 2'- fluoro
  modified_base 17: mod_base = gm
  modified_base 18: mod_base = OTHER; note = 2'-O- methyl
  modified_base 19: mod_base = OTHER; note = 2'-O- methyl
  modified_base 20: mod_base = cm
  modified_base 21: mod_base = um
  modified_base 22: mod_base = cm
  modified_base 23: mod_base = um
attgcttttattccaagaactct

SEQ ID NO: 442 - RNA, 21 nt, synthetic construct
  source 1..21: mol_type = other RNA
  modified_base 1: mod_base = OTHER; note = 2'- fluoro
  modified_base 2: mod_base = gm
  modified_base 3: mod_base = OTHER; note = 2'- fluoro
  modified_base 4: mod_base = um
  modified_base 5: mod_base = OTHER; note = 2'- fluoro
  modified_base 6: mod_base = um
  modified_base 7: mod_base = OTHER; note = 2'- fluoro
  modified_base 8: mod_base = gm
  modified_base 9: mod_base = OTHER; note = 2'- fluoro
  modified_base 10: mod_base = OTHER; note = 2'- fluoro
  modified_base 11: mod_base = OTHER; note = 2'- fluoro
  modified_base 12: mod_base = um
  modified_base 13: mod_base = OTHER; note = 2'- fluoro
  modified_base 14: mod_base = OTHER; note = 2'-O- methyl
  modified_base 15: mod_base = OTHER; note = 2'- fluoro
  modified_base 16: mod_base = OTHER; note = 2'-O- methyl
  modified_base 17: mod_base = OTHER; note = 2'- fluoro
  modified_base 18: mod_base = cm
  modified_base 19: mod_base = OTHER; note = 2'- fluoro
  modified_base 20: mod_base = OTHER; note = 2'-O- methyl
  modified_base 21: mod_base = OTHER; note = 2'- fluoro
  misc_binding 21: bound_moiety = L96
agttcttggaataaaagcaat

SEQ ID NO: 443 - RNA, 23 nt, synthetic construct
  source 1..23: mol_type = other RNA
  modified_base 1: mod_base = OTHER; note = 2'-O- methyl
  modified_base 2: mod_base = OTHER; note = 2'- fluoro
  modified_base 3: mod_base = um
  modified_base 4: mod_base = OTHER; note = 2'- fluoro
  modified_base 5: mod_base = cm
  modified_base 6: mod_base = OTHER; note = 2'- fluoro
  modified_base 7: mod_base = um
  modified_base 8: mod_base = OTHER; note = 2'- fluoro
  modified_base 9: mod_base = um
  modified_base 10: mod_base = OTHER; note = 2'- fluoro
  modified_base 11: mod_base = um
  modified_base 12: mod_base = um
  modified_base 13: mod_base = cm
  modified_base 14: mod_base = OTHER; note = 2'- fluoro
  modified_base 15: mod_base = OTHER; note = 2'-O- methyl
  modified_base 16: mod_base = OTHER; note = 2'- fluoro
  modified_base 17: mod_base = gm
  modified_base 18: mod_base = OTHER; note = 2'- fluoro
  modified_base 19: mod_base = OTHER; note = 2'-O- methyl
  modified_base 20: mod_base = OTHER; note = 2'- fluoro
  modified_base 21: mod_base = um
  modified_base 22: mod_base = cm
  modified_base 23: mod_base = um
attgcttttattccaagaactct

SEQ ID NO: 444 - RNA, 23 nt, synthetic construct
  source 1..23: mol_type = other RNA
  modified_base 1: mod_base = OTHER; note = 2'-O- methyl
  modified_base 2: mod_base = OTHER; note = 2'- fluoro
  modified_base 3: mod_base = um
  modified_base 4: mod_base = gm
  modified_base 5: mod_base = cm
  modified_base 6: mod_base = OTHER; note = 2'- fluoro
  modified_base 7: mod_base = um
  modified_base 8: mod_base = um
  modified_base 9: mod_base = OTHER; note = 2'- fluoro
  modified_base 10: mod_base = OTHER; note = 2'-O- methyl
  modified_base 11: mod_base = um
  modified_base 12: mod_base = um
  modified_base 13: mod_base = cm
  modified_base 14: mod_base = OTHER; note = 2'- fluoro
  modified_base 15: mod_base = OTHER; note = 2'-O- methyl
  modified_base 16: mod_base = OTHER; note = 2'- fluoro
  modified_base 17: mod_base = gm
  modified_base 18: mod_base = OTHER; note = 2'-O- methyl
  modified_base 19: mod_base = OTHER; note = 2'-O- methyl
  modified_base 20: mod_base = cm
  modified_base 21: mod_base = um
  modified_base 22: mod_base = cm
  modified_base 23: mod_base = um
attgcttttattccaagaactct

SEQ ID NO: 445 - RNA, 21 nt, synthetic construct
  source 1..21: mol_type = other RNA
  modified_base 1: mod_base = OTHER; note = 2'-O- methyl
  modified_base 2: mod_base = gm
  modified_base 3: mod_base = um
  modified_base 4: mod_base = um
  modified_base 5: mod_base = cm
  modified_base 6: mod_base = um
  modified_base 7: mod_base = um
  modified_base 8: mod_base = gm
  modified_base 9: mod_base = OTHER; note = 2'- fluoro
  modified_base 10: mod_base = OTHER; note = 2'- fluoro
  modified_base 11: mod_base = OTHER; note = 2'- fluoro
  modified_base 12: mod_base = um
  modified_base 13: mod_base = OTHER; note = 2'-O- methyl
  modified_base 14: mod_base = OTHER; note = 2'-O- methyl
  modified_base 15: mod_base = OTHER; note = 2'-O- methyl
  modified_base 16: mod_base = OTHER; note = 2'-O- methyl
  modified_base 17: mod_base = gm
  modified_base 18: mod_base = cm
  modified_base 19: mod_base = OTHER; note = 2'-O- methyl
  modified_base 20: mod_base = OTHER; note = 2'-O- methyl
  modified_base 21: mod_base = um
  misc_binding 21: bound_moiety = L96
agttcttggaataaaagcaat

SEQ ID NO: 446 - RNA, 23 nt, synthetic construct
  source 1..23: mol_type = other RNA
  modified_base 1: mod_base = OTHER; note = 2'-O- methyl
  modified_base 2: mod_base = OTHER; note = 2'- deoxyribose
  modified_base 3: mod_base = um
  modified_base 4: mod_base = gm
  modified_base 5: mod_base = OTHER; note = 2'- deoxyribose
  modified_base 6: mod_base = um
  modified_base 7: mod_base = OTHER; note = 2'- deoxyribose
  modified_base 8: mod_base = um
  modified_base 9: mod_base = um
  modified_base 10: mod_base = OTHER; note = 2'-O- methyl
  modified_base 11: mod_base = um
  modified_base 13: mod_base = cm
  modified_base 14: mod_base = OTHER; note = 2'- fluoro
  modified_base 15: mod_base = OTHER; note = 2'-O- methyl
  modified_base 16: mod_base = OTHER; note = 2'-O- methyl
  modified_base 17: mod_base = gm
  modified_base 18: mod_base = OTHER; note = 2'-O- methyl
  modified_base 19: mod_base = OTHER; note = 2'-O- methyl
  modified_base 20: mod_base = cm
  modified_base 21: mod_base = um
  modified_base 22: mod_base = cm
  modified_base 23: mod_base = um
attgcttttattccaagaactct

SEQ ID NO: 447 - RNA, 23 nt, synthetic construct
  source 1..23: mol_type = other RNA
  modified_base 1: mod_base = OTHER; note = 2'-O- methyl
  modified_base 2: mod_base = OTHER; note = 2'- fluoro
  modified_base 3: mod_base = um
  modified_base 4: mod_base = gm
  modified_base 5: mod_base = OTHER; note = 2'- fluoro
  modified_base 6: mod_base = OTHER; note = 2'- fluoro
  modified_base 7: mod_base = um
  modified_base 8: mod_base = um
  modified_base 9: mod_base = um
  modified_base 10: mod_base = OTHER; note = 2'-O- methyl
  modified_base 11: mod_base = um
  modified_base 12: mod_base = um
  modified_base 13: mod_base = cm
  modified_base 14: mod_base = OTHER; note = 2'- fluoro
  modified_base 15: mod_base = OTHER; note = 2'-O- methyl
  modified_base 16: mod_base = OTHER; note = 2'- fluoro
  modified_base 17: mod_base = gm
  modified_base 18: mod_base = OTHER; note = 2'-O- methyl
  modified_base 19: mod_base = OTHER; note = 2'-O- methyl
  modified_base 20: mod_base = cm
  modified_base 21: mod_base = um
  modified_base 22: mod_base = cm
  modified_base 23: mod_base = um
attgcttttattccaagaactct

SEQ ID NO: 448 - RNA, 23 nt, synthetic construct
  source 1..23: mol_type = other RNA
  modified_base 1: mod_base = OTHER; note = 2'-O- methyl
  modified_base 2: mod_base = OTHER; note = 2'- fluoro
  modified_base 3: mod_base = um
  modified_base 4: mod_base = gm
  modified_base 5: mod_base = OTHER; note = 2'- fluoro
  modified_base 6: mod_base = OTHER; note = 2'- fluoro
  modified_base 7: mod_base = um
  modified_base 8: mod_base = OTHER; note = 2'- fluoro
  modified_base 9: mod_base = OTHER; note = 2'- fluoro
  modified_base 10: mod_base = OTHER; note = 2'-O- methyl
  modified_base 11: mod_base = um
  modified_base 12: mod_base = um
  modified_base 13: mod_base = cm
  modified_base 14: mod_base = OTHER; note = 2'- fluoro
  modified_base 15: mod_base = OTHER; note = 2'-O- methyl
  modified_base 16: mod_base = OTHER; note = 2'- fluoro
  modified_base 17: mod_base = gm
  modified_base 18: mod_base = OTHER; note = 2'-O- methyl
  modified_base 19: mod_base = OTHER; note = 2'-O- methyl
  modified_base 20: mod_base = cm
  modified_base 21: mod_base = um
  modified_base 22: mod_base = cm
  modified_base 23: mod_base = um
attgcttttattccaagaactct

SEQ ID NO: 449 - RNA, 23 nt, synthetic construct
  source 1..23: mol_type = other RNA
  modified_base 1: mod_base = OTHER; note = 2'-O- methyl
  modified_base 2: mod_base = OTHER; note = 2'- fluoro
  modified_base 3: mod_base = um
  modified_base 4: mod_base = gm
  modified_base 5: mod_base = cm
  modified_base 6: mod_base = OTHER; note = 2'- fluoro
  modified_base 7: mod_base = um
  modified_base 8: mod_base = um
  modified_base 9: mod_base = um
  modified_base 10: mod_base = OTHER; note = 2'- fluoro
  modified_base 11: mod_base = um
  modified_base 12: mod_base = um
  modified_base 13: mod_base = cm
  modified_base 14: mod_base = OTHER; note = 2'- fluoro
  modified_base 15: mod_base = OTHER; note = 2'-O- methyl
  modified_base 16: mod_base = OTHER; note = 2'- fluoro
  modified_base 17: mod_base = gm
  modified_base 18: mod_base = OTHER; note = 2'-O- methyl
  modified_base 19: mod_base = OTHER; note = 2'-O- methyl
  modified_base 20: mod_base = cm
  modified_base 21: mod_base = um
  modified_base 22: mod_base = cm
  modified_base 23: mod_base = um
attgcttttattccaagaactct

SEQ ID NO: 450 - RNA, 23 nt, synthetic construct
  source 1..23: mol_type = other RNA
  modified_base 1: mod_base = OTHER; note = 2'-O- methyl
  modified_base 2: mod_base = OTHER; note = 2'- fluoro
  modified_base 3: mod_base = um
  modified_base 4: mod_base = OTHER; note = 2'- fluoro
  modified_base 5: mod_base = cm
  modified_base 6: mod_base = OTHER; note = 2'- fluoro
  modified_base 7: mod_base = um
  modified_base 8: mod_base = OTHER; note = 2'- fluoro
  modified_base 9: mod_base = um
  modified_base 10: mod_base = OTHER; note = 2'- fluoro
  modified_base 11: mod_base = um
  modified_base 12: mod_base = um
  modified_base 13: mod_base = cm
  modified_base 14: mod_base = OTHER; note = 2'- fluoro
  modified_base 15: mod_base = OTHER; note = 2'-O- methyl
  modified_base 16: mod_base = OTHER; note = 2'- fluoro
  modified_base 17: mod_base = gm
  modified_base 18: mod_base = OTHER; note = 2'- fluoro
  modified_base 19: mod_base = OTHER; note = 2'-O- methyl
  modified_base 20: mod_base = OTHER; note = 2'- fluoro
  modified_base 21: mod_base = um
  modified_base 22: mod_base = cm
  modified_base 23: mod_base = um
attgcttttattccaagaactct

SEQ ID NO: 451 - RNA, 23 nt, synthetic construct
  source 1..23: mol_type = other RNA
  modified_base 1: mod_base = OTHER; note = 2'-O- methyl
  modified_base 2: mod_base = OTHER; note = 2'- fluoro
  modified_base 3: mod_base = um
  modified_base 4: mod_base = gm
  modified_base 5: mod_base = cm
  modified_base 6: mod_base = OTHER; note = 2'- fluoro
  modified_base 7: mod_base = um
  modified_base 8: mod_base = um
  modified_base 9: mod_base = OTHER; note = 2'- fluoro
  modified_base 10: mod_base = OTHER; note = 2'-O- methyl
  modified_base 11: mod_base = um
  modified_base 12: mod_base = um
  modified_base 13: mod_base = cm
  modified_base 14: mod_base = OTHER; note = 2'- fluoro
  modified_base 15: mod_base = OTHER; note = 2'-O- methyl
  modified_base 16: mod_base = OTHER; note = 2'- fluoro
  modified_base 17: mod_base = gm
  modified_base 18: mod_base = OTHER; note = 2'-O- methyl
  modified_base 19: mod_base = OTHER; note = 2'-O- methyl
  modified_base 20: mod_base = cm
  modified_base 21: mod_base = um
  modified_base 22: mod_base = cm
  modified_base 23: mod_base = um
  modified_base 1: mod_base = OTHER; note = Ethylene Vinyl Phosphate Modification
attgcttttattccaagaactct

SEQ ID NO: 452 - RNA, 23 nt, synthetic construct
  source 1..23: mol_type = other RNA
  modified_base 1: mod_base = OTHER; note = 2'-O- methyl
  modified_base 2: mod_base = OTHER; note = 2'- deoxyribose
  modified_base 3: mod_base = um
  modified_base 4: mod_base = gm
  modified_base 5: mod_base = OTHER; note = 2'- deoxyribose
  modified_base 6: mod_base = um
  modified_base 7: mod_base = OTHER; note = 2'- deoxyribose
  modified_base 8: mod_base = um
  modified_base 9: mod_base = um
  modified_base 10: mod_base = OTHER; note = 2'-O- methyl
  modified_base 11: mod_base = um
  modified_base 13: mod_base = cm
  modified_base 14: mod_base = OTHER; note = 2'- fluoro
  modified_base 15: mod_base = OTHER; note = 2'-O- methyl
  modified_base 16: mod_base = OTHER; note = 2'-O- methyl
  modified_base 17: mod_base = gm
  modified_base 18: mod_base = OTHER; note = 2'-O- methyl
  modified_base 19: mod_base = OTHER; note = 2'-O- methyl
  modified_base 20: mod_base = cm
  modified_base 21: mod_base = um
  modified_base 22: mod_base = cm
  modified_base 23: mod_base = um
  modified_base 1: mod_base = OTHER; note = Ethylene Vinyl Phosphate Modification
attgcttttattccaagaactct

SEQ ID NO: 453 - RNA, 23 nt, synthetic construct
  source 1..23: mol_type = other RNA
  modified_base 1: mod_base = OTHER; note = 2'-O- methyl
  modified_base 2: mod_base = OTHER; note = 2'- fluoro
  modified_base 3: mod_base = um
  modified_base 4: mod_base = gm
  modified_base 5: mod_base = OTHER; note = 2'- fluoro
  modified_base 6: mod_base = OTHER; note = 2'- fluoro
  modified_base 7: mod_base = um
  modified_base 8: mod_base = um
  modified_base 9: mod_base = um
  modified_base 10: mod_base = OTHER; note = 2'-O- methyl
  modified_base 11: mod_base = um
  modified_base 12: mod_base = um
  modified_base 13: mod_base = cm
  modified_base 14: mod_base = OTHER; note = 2'- fluoro
  modified_base 15: mod_base = OTHER; note = 2'-O- methyl
  modified_base 16: mod_base = OTHER; note = 2'- fluoro
  modified_base 17: mod_base = gm
  modified_base 18: mod_base = OTHER; note = 2'-O- methyl
  modified_base 19: mod_base = OTHER; note = 2'-O- methyl
  modified_base 20: mod_base = cm
  modified_base 21: mod_base = um
  modified_base 22: mod_base = cm
  modified_base 23: mod_base = um
  modified_base 1: mod_base = OTHER; note = Ethylene Vinyl Phosphate Modification
attgcttttattccaagaactct

SEQ ID NO: 454 - RNA, 23 nt, synthetic construct
  source 1..23: mol_type = other RNA
  modified_base 1: mod_base = OTHER; note = 2'-O- methyl
  modified_base 2: mod_base = OTHER; note = 2'- fluoro
  modified_base 3: mod_base = um
  modified_base 4: mod_base = gm
  modified_base 5: mod_base = OTHER; note = 2'- fluoro
  modified_base 6: mod_base = OTHER; note = 2'- fluoro
  modified_base 7: mod_base = um
  modified_base 8: mod_base = OTHER; note = 2'- fluoro
  modified_base 9: mod_base = OTHER; note = 2'- fluoro
  modified_base 10: mod_base = OTHER; note = 2'-O- methyl
  modified_base 11: mod_base = um
  modified_base 12: mod_base = um
  modified_base 13: mod_base = cm
  modified_base 14: mod_base = OTHER; note = 2'- fluoro
  modified_base 15: mod_base = OTHER; note = 2'-O- methyl
  modified_base 16: mod_base = OTHER; note = 2'- fluoro
  modified_base 17: mod_base = gm
  modified_base 18: mod_base = OTHER; note = 2'-O- methyl
  modified_base 19: mod_base = OTHER; note = 2'-O- methyl
  modified_base 20: mod_base = cm
  modified_base 21: mod_base = um
  modified_base 22: mod_base = cm
  modified_base 23: mod_base = um
  modified_base 1: mod_base = OTHER; note = Ethylene Vinyl Phosphate Modification
attgcttttattccaagaactct

SEQ ID NO: 455 - RNA, 20 nt, synthetic construct
  source 1..20: mol_type = other RNA
  modified_base 1: mod_base = gm
  modified_base 2: mod_base = um
  modified_base 3: mod_base = um
  modified_base 4: mod_base = cm
  modified_base 5: mod_base = um
  modified_base 6: mod_base = um
  modified_base 7: mod_base = gm
  modified_base 8: mod_base = OTHER; note = 2'- fluoro
  modified_base 9: mod_base = OTHER; note = 2'- fluoro
  modified_base 10: mod_base = OTHER; note = 2'- fluoro
  modified_base 11: mod_base = um
  modified_base 12: mod_base = OTHER; note = 2'-O- methyl
  modified_base 13: mod_base = OTHER; note = 2'-O- methyl
  modified_base 14: mod_base = OTHER; note = 2'-O- methyl
  modified_base 15: mod_base = OTHER; note = 2'-O- methyl
  modified_base 16: mod_base = gm
  modified_base 17: mod_base = cm
  modified_base 18: mod_base = OTHER; note = 2'-O- methyl
  modified_base 19: mod_base = OTHER; note = 2'-O- methyl
  modified_base 20: mod_base = um
  misc_binding 20: bound_moiety = L96
gttcttggaataaaagcaat

SEQ ID NO: 456 - RNA, 22 nt, synthetic construct
  source 1..22: mol_type = other RNA
  modified_base 1: mod_base = OTHER; note = 2'-O- methyl
  modified_base 2: mod_base = OTHER; note = 2'- fluoro
  modified_base 3: mod_base = um
  modified_base 4: mod_base = gm
  modified_base 5: mod_base = cm
  modified_base 6: mod_base = OTHER; note = 2'- fluoro
  modified_base 7: mod_base = um
  modified_base 8: mod_base = um
  modified_base 9: mod_base = um
  modified_base 10: mod_base = OTHER; note = 2'-O- methyl
  modified_base 11: mod_base = um
  modified_base 12: mod_base = um
  modified_base 13: mod_base = cm
  modified_base 14: mod_base = OTHER; note = 2'- fluoro
  modified_base 15: mod_base = OTHER; note = 2'-O- methyl
  modified_base 16: mod_base = OTHER; note = 2'- fluoro
  modified_base 17: mod_base = gm
  modified_base 18: mod_base = OTHER; note = 2'-O- methyl
  modified_base 19: mod_base = OTHER; note = 2'-O- methyl
  modified_base 20: mod_base = cm
  modified_base 21: mod_base = um
  modified_base 22: mod_base = cm
attgcttttattccaagaactc

SEQ ID NO: 457 - RNA, 21 nt, synthetic construct
  source 1..21: mol_type = other RNA
  modified_base 1: mod_base = OTHER; note = 2'-O- methyl
  modified_base 2: mod_base = OTHER; note = 2'- fluoro
  modified_base 3: mod_base = um
  modified_base 4: mod_base = gm
  modified_base 5: mod_base = cm
  modified_base 6: mod_base = OTHER; note = 2'- fluoro
  modified_base 7: mod_base = um
  modified_base 8: mod_base = um
  modified_base 9: mod_base = um
  modified_base 10: mod_base = OTHER; note = 2'-O- methyl
  modified_base 11: mod_base = um
  modified_base 12: mod_base = um
  modified_base 13: mod_base = cm
  modified_base 14: mod_base = OTHER; note = 2'- fluoro
  modified_base 15: mod_base = OTHER; note = 2'-O- methyl
  modified_base 16: mod_base = OTHER; note = 2'- fluoro
  modified_base 17: mod_base = gm
  modified_base 18: mod_base = OTHER; note = 2'-O- methyl
  modified_base 19: mod_base = OTHER; note = 2'-O- methyl
  modified_base 20: mod_base = cm
  modified_base 21: mod_base = um
attgcttttattccaagaact

SEQ ID NO: 458 - RNA, 19 nt, synthetic construct
  source 1..19: mol_type = other RNA
  modified_base 1: mod_base = um
  modified_base 2: mod_base = um
  modified_base 3: mod_base = cm
  modified_base 4: mod_base = um
  modified_base 5: mod_base = um
  modified_base 6: mod_base = gm
  modified_base 7: mod_base = OTHER; note = 2'- fluoro
  modified_base 8: mod_base = OTHER; note = 2'- fluoro
  modified_base 9: mod_base = OTHER; note = 2'- fluoro
  modified_base 10: mod_base = um
  modified_base 11: mod_base = OTHER; note = 2'-O- methyl
  modified_base 12: mod_base = OTHER; note = 2'-O- methyl
  modified_base 13: mod_base = OTHER; note = 2'-O- methyl
  modified_base 14: mod_base = OTHER; note = 2'-O- methyl
  modified_base 15: mod_base = gm
  modified_base 16: mod_base = cm
  modified_base 17: mod_base = OTHER; note = 2'-O- methyl
  modified_base 18: mod_base = OTHER; note = 2'-O- methyl
  modified_base 19: mod_base = um
  misc_binding 19: bound_moiety = L96
ttcttggaataaaagcaat

SEQ ID NO: 459 - RNA, 22 nt, synthetic construct
  source 1..22: mol_type = other RNA
  modified_base 1: mod_base = OTHER; note = 2'-O- methyl
  modified_base 2: mod_base = OTHER; note = 2'- fluoro
  modified_base 3: mod_base = um
  modified_base 4: mod_base = gm
  modified_base 5: mod_base = cm
  modified_base 6: mod_base = OTHER; note = 2'- fluoro
  modified_base 7: mod_base = um
  modified_base 8: mod_base = um
  modified_base 9: mod_base = um
  modified_base 10: mod_base = OTHER; note = 2'-O- methyl
  modified_base 11: mod_base = um
  modified_base 12: mod_base = um
  modified_base 13: mod_base = cm
  modified_base 14: mod_base = OTHER; note = 2'- fluoro
  modified_base 15: mod_base = OTHER; note = 2'-O- methyl
  modified_base 16: mod_base = OTHER; note = 2'- fluoro
  modified_base 17: mod_base = gm
  modified_base 18: mod_base = OTHER; note = 2'-O- methyl
  modified_base 19: mod_base = OTHER; note = 2'-O- methyl
  modified_base 20: mod_base = cm
  modified_base 21: mod_base = um
  modified_base 22: mod_base = cm
  modified_base 1: mod_base = OTHER; note = Ethylene Vinyl Phosphate Modification
attgcttttattccaagaactc

SEQ ID NO: 460 - RNA, 21 nt, synthetic construct
  source 1..21: mol_type = other RNA
  modified_base 1: mod_base = OTHER; note = 2'-O- methyl
  modified_base 2: mod_base = OTHER; note = 2'- fluoro
  modified_base 3: mod_base = um
  modified_base 4: mod_base = gm
  modified_base 5: mod_base = cm
  modified_base 6: mod_base = OTHER; note = 2'- fluoro
  modified_base 7: mod_base = um
  modified_base 8: mod_base = um
  modified_base 9: mod_base = um
  modified_base 10: mod_base = OTHER; note = 2'-O- methyl
  modified_base 11: mod_base = um
  modified_base 12: mod_base = um
  modified_base 13: mod_base = cm
  modified_base 14: mod_base = OTHER; note = 2'- fluoro
  modified_base 15: mod_base = OTHER; note = 2'-O- methyl
  modified_base 16: mod_base = OTHER; note = 2'- fluoro
  modified_base 17: mod_base = gm
  modified_base 18: mod_base = OTHER; note = 2'-O- methyl
  modified_base 19: mod_base = OTHER; note = 2'-O- methyl
  modified_base 20: mod_base = cm
  modified_base 21: mod_base = um
  modified_base 1: mod_base = OTHER; note = Ethylene Vinyl Phosphate Modification
attgcttttattccaagaact

SEQ ID NO: 461 - RNA, 23 nt, synthetic construct
  source 1..23: mol_type = other RNA
  modified_base 1: mod_base = OTHER; note = 2'-O- methyl
  modified_base 2: mod_base = OTHER; note = 2'- fluoro
  modified_base 3: mod_base = um
  modified_base 4: mod_base = OTHER; note = 2'- fluoro
  modified_base 5: mod_base = cm
  modified_base 6: mod_base = OTHER; note = 2'- fluoro
  modified_base 7: mod_base = um
  modified_base 8: mod_base = OTHER; note = 2'- fluoro
  modified_base 9: mod_base = OTHER; note = 2'- fluoro
  modified_base 10: mod_base = OTHER; note = 2'-O- methyl
  modified_base 11: mod_base = um
  modified_base 12: mod_base = um
  modified_base 13: mod_base = cm
  modified_base 14: mod_base = OTHER; note = 2'- fluoro
  modified_base 15: mod_base = OTHER; note = 2'-O- methyl
  modified_base 16: mod_base = OTHER; note = 2'- fluoro
  modified_base 17: mod_base = gm
  modified_base 18: mod_base = OTHER; note = 2'-O- methyl
  modified_base 19: mod_base = OTHER; note = 2'-O- methyl
  modified_base 20: mod_base = cm
  modified_base 21: mod_base = um
  modified_base 22: mod_base = cm
  modified_base 23: mod_base = um
attgcttttattccaagaactct

SEQ ID NO: 462 - RNA, 23 nt, synthetic construct
  source 1..23: mol_type = other RNA
  modified_base 1: mod_base = OTHER; note = 2'-O- methyl
  modified_base 2: mod_base = OTHER; note = 2'- fluoro
  modified_base 3: mod_base = um
  modified_base 4: mod_base = gm
  modified_base 5: mod_base = cm
  modified_base 6: mod_base = um
  modified_base 7: mod_base = um
  modified_base 8: mod_base = um
  modified_base 9: mod_base = um
  modified_base 10: mod_base = OTHER; note = 2'-O- methyl
  modified_base 11: mod_base = um
  modified_base 12: mod_base = um
  modified_base 13: mod_base = cm
  modified_base 14: mod_base = OTHER; note = 2'- fluoro
  modified_base 15: mod_base = OTHER; note = 2'-O- methyl
  modified_base 16: mod_base = OTHER; note = 2'- fluoro
  modified_base 17: mod_base = gm
  modified_base 18: mod_base = OTHER; note = 2'-O- methyl
  modified_base 19: mod_base = OTHER; note = 2'-O- methyl
  modified_base 20: mod_base = cm
  modified_base 21: mod_base = um
  modified_base 22: mod_base = cm
  modified_base 23: mod_base = um
attgcttttattccaagaactct

SEQ ID NO: 463 - RNA, 23 nt, synthetic construct
  source 1..23: mol_type = other RNA
  modified_base 1: mod_base = OTHER; note = 2'-O- methyl
  modified_base 2: mod_base = OTHER; note = 2'- fluoro
  modified_base 3: mod_base = um
  modified_base 4: mod_base = OTHER; note = 2'- fluoro
  modified_base 5: mod_base = cm
  modified_base 6: mod_base = OTHER; note = 2'- fluoro
  modified_base 7: mod_base = um
  modified_base 8: mod_base = um
  modified_base 9: mod_base = um
  modified_base 10: mod_base = OTHER; note = 2'-O- methyl
  modified_base 11: mod_base = um
  modified_base 12: mod_base = um
  modified_base 13: mod_base = cm
  modified_base 14: mod_base = OTHER; note = 2'- fluoro
  modified_base 15: mod_base = OTHER; note = 2'-O- methyl
  modified_base 16: mod_base = OTHER; note = 2'- fluoro
  modified_base 17: mod_base = gm
  modified_base 18: mod_base = OTHER; note = 2'-O- methyl
  modified_base 19: mod_base = OTHER; note = 2'-O- methyl
  modified_base 20: mod_base = cm
  modified_base 21: mod_base = um
  modified_base 22: mod_base = cm
  modified_base 23: mod_base = um
attgcttttattccaagaactct

SEQ ID NO: 464 - RNA, 21 nt, synthetic construct
  source 1..21: mol_type = other RNA
  modified_base 1: mod_base = OTHER; note = 2'-O- methyl
  modified_base 2: mod_base = gm
  modified_base 3: mod_base = um
  modified_base 4: mod_base = um
  modified_base 5: mod_base = cm
  modified_base 6: mod_base = um
  modified_base 7: mod_base = um
  modified_base 8: mod_base = gm
  modified_base 9: mod_base = OTHER; note = 2'- fluoro
  modified_base 10: mod_base = OTHER; note = 2'- fluoro
  modified_base 11: mod_base = OTHER; note = 2'- fluoro
  modified_base 12: mod_base = um
  modified_base 13: mod_base = OTHER; note = 2'-O- methyl
  modified_base 14: mod_base = OTHER; note = 2'-O- methyl
  modified_base 15: mod_base = OTHER; note = 2'-O- methyl
  modified_base 16: mod_base = OTHER; note = 2'-O- methyl
  modified_base 17: mod_base = gm
  modified_base 18: mod_base = cm
  modified_base 19: mod_base = OTHER; note = 2'-O- methyl
  modified_base 20: mod_base = OTHER; note = 2'-O- methyl
  modified_base 21: mod_base = um
  misc_binding 21: bound_moiety = L96
agttcttggaataaaagcaat

SEQ ID NO: 465 - RNA, 20 nt, synthetic construct
  source 1..20: mol_type = other RNA
  modified_base 1: mod_base = gm
  modified_base 2: mod_base = um
  modified_base 3: mod_base = um
  modified_base 4: mod_base = cm
  modified_base 5: mod_base = um
  modified_base 6: mod_base = um
  modified_base 7: mod_base = gm
  modified_base 8: mod_base = OTHER; note = 2'- fluoro
  modified_base 9: mod_base = OTHER; note = 2'- fluoro
  modified_base 10: mod_base = OTHER; note = 2'- fluoro
  modified_base 11: mod_base = um
  modified_base 12: mod_base = OTHER; note = 2'-O- methyl
  modified_base 13: mod_base = OTHER; note = 2'-O- methyl
  modified_base 14: mod_base = OTHER; note = 2'-O- methyl
  modified_base 15: mod_base = OTHER; note = 2'-O- methyl
  modified_base 16: mod_base = gm
  modified_base 17: mod_base = cm
  modified_base 18: mod_base = OTHER; note = 2'-O- methyl
  modified_base 19: mod_base = OTHER; note = 2'-O- methyl
  modified_base 20: mod_base = um
  misc_binding 20: bound_moiety = L96
gttcttggaataaaagcaat

SEQ ID NO: 466 - RNA, 22 nt, synthetic construct
  source 1..22: mol_type = other RNA
  modified_base 1: mod_base = OTHER; note = 2'-O- methyl
  modified_base 2: mod_base = OTHER; note = 2'- fluoro
  modified_base 3: mod_base = um
  modified_base 4: mod_base = gm
  modified_base 5: mod_base = cm
  modified_base 6: mod_base = um
  modified_base 7: mod_base = um
  modified_base 8: mod_base = um
  modified_base 9: mod_base = um
  modified_base 10: mod_base = OTHER; note = 2'-O- methyl
  modified_base 11: mod_base = um
  modified_base 12: mod_base = um
  modified_base 13: mod_base = cm
  modified_base 14: mod_base = OTHER; note = 2'- fluoro
  modified_base 15: mod_base = OTHER; note = 2'-O- methyl
  modified_base 16: mod_base = OTHER; note = 2'- fluoro
  modified_base 17: mod_base = gm
  modified_base 18: mod_base = OTHER; note = 2'-O- methyl
  modified_base 19: mod_base = OTHER; note = 2'-O- methyl
  modified_base 20: mod_base = cm
  modified_base 21: mod_base = um
  modified_base 22: mod_base = cm
attgcttttattccaagaactc

SEQ ID NO: 467 - RNA, 22 nt, synthetic construct
  source 1..22: mol_type = other RNA
  modified_base 1: mod_base = OTHER; note = 2'-O- methyl
  modified_base 2: mod_base = OTHER; note = 2'- fluoro
  modified_base 3: mod_base = um
  modified_base 4: mod_base = OTHER; note = 2'- fluoro
  modified_base 5: mod_base = cm
  modified_base 6: mod_base = OTHER; note = 2'- fluoro
  modified_base 7: mod_base = um
  modified_base 8: mod_base = um
  modified_base 9: mod_base = um
  modified_base 10: mod_base = OTHER; note = 2'-O- methyl
  modified_base 11: mod_base = um
  modified_base 12: mod_base = um
  modified_base 13: mod_base = cm
  modified_base 14: mod_base = OTHER; note = 2'- fluoro
  modified_base 15: mod_base = OTHER; note = 2'-O- methyl
  modified_base 16: mod_base = OTHER; note = 2'- fluoro
  modified_base 17: mod_base = gm
  modified_base 18: mod_base = OTHER; note = 2'-O- methyl
  modified_base 19: mod_base = OTHER; note = 2'-O- methyl
  modified_base 20: mod_base = cm
  modified_base 21: mod_base = um
  modified_base 22: mod_base = cm
attgcttttattccaagaactc

SEQ ID NO: 468 - RNA, 21 nt, synthetic construct
  source 1..21: mol_type = other RNA
  modified_base 1: mod_base = gm
  modified_base 2: mod_base = OTHER; note = 2'-O- methyl
  modified_base 3: mod_base = OTHER; note = 2'-O- methyl
  modified_base 4: mod_base = um
  modified_base 5: mod_base = OTHER; note = 2'-O- methyl
  modified_base 6: mod_base = OTHER; note = 2'-O- methyl
  modified_base 7: mod_base = OTHER; note = 2'- fluoro
  modified_base 8: mod_base = OTHER; note = 2'-O- methyl
  modified_base 9: mod_base = OTHER; note = 2'- fluoro
  modified_base 10: mod_base = OTHER; note = 2'- fluoro
  modified_base 11: mod_base = OTHER; note = 2'- fluoro
  modified_base 12: mod_base = OTHER; note = 2'-O- methyl
  modified_base 13: mod_base = cm
  modified_base 14: mod_base = cm
  modified_base 15: mod_base = um
  modified_base 16: mod_base = cm
  modified_base 17: mod_base = OTHER; note = 2'-O- methyl
  modified_base 18: mod_base = gm
  modified_base 19: mod_base = OTHER; note = 2'-O- methyl
  modified_base 20: mod_base = OTHER; note = 2'-O- methyl
  modified_base 21: mod_base = OTHER; note = 2'-O- methyl
  misc_binding 21: bound_moiety = L96
gaataaaagcaacctcagaaa

SEQ ID NO: 469 - RNA, 23 nt, synthetic construct
  source 1..23: mol_type = other RNA
  modified_base 1: mod_base = um
  modified_base 2: mod_base = OTHER; note = 2'- fluoro
  modified_base 3: mod_base = um
  modified_base 4: mod_base = cm
  modified_base 5: mod_base = um
  modified_base 6: mod_base = OTHER; note = 2'- fluoro
  modified_base 7: mod_base = OTHER; note = 2'-O- methyl
  modified_base 8: mod_base = OTHER; note = 2'- fluoro
  modified_base 9: mod_base = OTHER; note = 2'- fluoro
  modified_base 10: mod_base = um
  modified_base 11: mod_base = um
  modified_base 12: mod_base = gm
  modified_base 13: mod_base = cm
  modified_base 14: mod_base = OTHER; note = 2'- fluoro
  modified_base 15: mod_base = um
  modified_base 16: mod_base = OTHER; note = 2'- fluoro
  modified_base 17: mod_base = um
  modified_base 18: mod_base = OTHER; note = 2'-O- methyl
  modified_base 19: mod_base = um
  modified_base 20: mod_base = um
  modified_base 21: mod_base = cm
  modified_base 22: mod_base = cm
  modified_base 23: mod_base = OTHER; note = 2'-O- methyl
tttctgaggttgcttttattcca

SEQ ID NO: 470 - RNA, 21 nt, synthetic construct
  source 1..21: mol_type = other RNA
  modified_base 1: mod_base = gm
  modified_base 2: mod_base = OTHER; note = 2'-O- methyl
  modified_base 3: mod_base = OTHER; note = 2'-O- methyl
  modified_base 4: mod_base = cm
  modified_base 5: mod_base = OTHER; note = 2'-O- methyl
  modified_base 6: mod_base = OTHER; note = 2'-O- methyl
  modified_base 7: mod_base = OTHER; note = 2'- fluoro
  modified_base 8: mod_base = OTHER; note = 2'-O- methyl
  modified_base 9: mod_base = OTHER; note = 2'- fluoro
  modified_base 10: mod_base = OTHER; note = 2'- fluoro
  modified_base 11: mod_base = OTHER; note = 2'- fluoro
  modified_base 12: mod_base = OTHER; note = 2'-O- methyl
  modified_base 13: mod_base = cm
  modified_base 14: mod_base = cm
  modified_base 15: mod_base = um
  modified_base 16: mod_base = cm
  modified_base 17: mod_base = OTHER; note = 2'-O- methyl
  modified_base 18: mod_base = gm
  modified_base 19: mod_base = OTHER; note = 2'-O- methyl
  modified_base 20: mod_base = OTHER; note = 2'-O- methyl
  modified_base 21: mod_base = OTHER; note = 2'-O- methyl
  misc_binding 21: bound_moiety = L96
gaacaaaagcaacctcagaaa

SEQ ID NO: 471 - RNA, 23 nt, synthetic construct
  source 1..23: mol_type = other RNA
  modified_base 1: mod_base = um
  modified_base 2: mod_base = OTHER; note = 2'- fluoro
  modified_base 3: mod_base = um
  modified_base 4: mod_base = cm
  modified_base 5: mod_base = um
  modified_base 6: mod_base = OTHER; note = 2'- fluoro
  modified_base 7: mod_base = OTHER; note = 2'-O- methyl
  modified_base 8: mod_base = OTHER; note = 2'- fluoro
  modified_base 9: mod_base = OTHER; note = 2'- fluoro
  modified_base 10: mod_base = um
  modified_base 11: mod_base = um
  modified_base 12: mod_base = gm
  modified_base 13: mod_base = cm
  modified_base 14: mod_base = OTHER; note = 2'- fluoro
  modified_base 15: mod_base = um
  modified_base 16: mod_base = OTHER; note = 2'- fluoro
  modified_base 17: mod_base = um
  modified_base 18: mod_base = gm
  modified_base 19: mod_base = um
  modified_base 20: mod_base = um
  modified_base 21: mod_base = cm
  modified_base 22: mod_base = um
  modified_base 23: mod_base = um
tttctgaggttgcttttgttctt

SEQ ID NO: 472 - RNA, 20 nt, synthetic construct
  source 1..20: mol_type = other RNA
  modified_base 1: mod_base = gm
  modified_base 2: mod_base = OTHER; note = 2'-O- methyl
  modified_base 3: mod_base = OTHER; note = 2'-O- methyl
  modified_base 4: mod_base = cm
  modified_base 5: mod_base = OTHER; note = 2'-O- methyl
  modified_base 6: mod_base = OTHER; note = 2'- fluoro
  modified_base 7: mod_base = OTHER; note = 2'-O- methyl
  modified_base 8: mod_base = OTHER; note = 2'- fluoro
  modified_base 9: mod_base = OTHER; note = 2'- fluoro
  modified_base 10: mod_base = OTHER; note = 2'- fluoro
  modified_base 11: mod_base = OTHER; note = 2'-O- methyl
  modified_base 12: mod_base = OTHER; note = 2'-O- methyl
  modified_base 13: mod_base = cm
  modified_base 14: mod_base = cm
  modified_base 15: mod_base = um
  modified_base 16: mod_base = cm
  modified_base 17: mod_base = OTHER; note = 2'-O- methyl
  modified_base 18: mod_base = gm
  modified_base 19: mod_base = OTHER; note = 2'-O- methyl
  modified_base 20: mod_base = OTHER; note = 2'-O- methyl
  misc_binding 20: bound_moiety = L96
gaacaaaagcaacctcagaa

SEQ ID NO: 473 - RNA, 22 nt, synthetic construct
  source 1..22: mol_type = other RNA
  modified_base 1: mod_base = um
  modified_base 2: mod_base = OTHER; note = 2'- fluoro
  modified_base 3: mod_base = cm
  modified_base 4: mod_base = um
  modified_base 5: mod_base = gm
  modified_base 6: mod_base = OTHER; note = 2'- fluoro
  modified_base 7: mod_base = gm
  modified_base 8: mod_base = OTHER; note = 2'- fluoro
  modified_base 9: mod_base = OTHER; note = 2'- fluoro
  modified_base 10: mod_base = um
  modified_base 11: mod_base = gm
  modified_base 12: mod_base = cm
  modified_base 13: mod_base = um
  modified_base 14: mod_base = OTHER; note = 2'- fluoro
  modified_base 15: mod_base = um
  modified_base 16: mod_base = OTHER; note = 2'- fluoro
  modified_base 17: mod_base = gm
  modified_base 18: mod_base = um
  modified_base 19: mod_base = um
  modified_base 20: mod_base = cm
  modified_base 21: mod_base = um
  modified_base 22: mod_base = um
ttctgaggttgcttttgttctt

SEQ ID NO: 474 - RNA, 23 nt, synthetic construct
  source 1..23: mol_type = other RNA
  modified_base 1: mod_base = um
  modified_base 2: mod_base = OTHER; note = 2'- fluoro
  modified_base 3: mod_base = um
  modified_base 4: mod_base = cm
  modified_base 5: mod_base = um
  modified_base 6: mod_base = OTHER; note = 2'- fluoro
  modified_base 7: mod_base = OTHER; note = 2'-O- methyl
  modified_base 8: mod_base = gm
  modified_base 9: mod_base = gm
  modified_base 10: mod_base = um
  modified_base 11: mod_base = um
  modified_base 12: mod_base = gm
  modified_base 13: mod_base = cm
  modified_base 14: mod_base = OTHER; note = 2'- fluoro
  modified_base 15: mod_base = um
  modified_base 16: mod_base = OTHER; note = 2'- fluoro
  modified_base 17: mod_base = um
  modified_base 18: mod_base = gm
  modified_base 19: mod_base = um
  modified_base 20: mod_base = um
  modified_base 21: mod_base = cm
  modified_base 22: mod_base = um
  modified_base 23: mod_base = um
tttctgaggttgcttttgttctt

SEQ ID NO: 475 - RNA, 22 nt, synthetic construct
  source 1..22: mol_type = other RNA
  modified_base 1: mod_base = um
  modified_base 2: mod_base = OTHER; note = 2'- fluoro
  modified_base 3: mod_base = cm
  modified_base 4: mod_base = um
  modified_base 5: mod_base = gm
  modified_base 6: mod_base = OTHER; note = 2'- fluoro
  modified_base 7: mod_base = gm
  modified_base 8: mod_base = gm
  modified_base 9: mod_base = um
  modified_base 10: mod_base = um
  modified_base 11: mod_base = gm
  modified_base 12: mod_base = cm
  modified_base 13: mod_base = um
  modified_base 14: mod_base = OTHER; note = 2'- fluoro
  modified_base 15: mod_base = um
  modified_base 16: mod_base = OTHER; note = 2'- fluoro
  modified_base 17: mod_base = gm
  modified_base 18: mod_base = um
  modified_base 19: mod_base = um
  modified_base 20: mod_base = cm
  modified_base 21: mod_base = um
  modified_base 22: mod_base = um
ttctgaggttgcttttgttctt

SEQ ID NO: 476 - RNA, 21 nt, synthetic construct
  source 1..21: mol_type = other RNA
  modified_base 1: mod_base = gm
  modified_base 2: mod_base = OTHER; note = 2'-O- methyl
  modified_base 3: mod_base = OTHER; note = 2'-O- methyl
  modified_base 4: mod_base = um
  modified_base 5: mod_base = OTHER; note = 2'-O- methyl
  modified_base 6: mod_base = OTHER; note = 2'-O- methyl
  modified_base 7: mod_base = OTHER; note = 2'-O- methyl
  modified_base 8: mod_base = OTHER; note = 2'-O- methyl
  modified_base 9: mod_base = OTHER; note = 2'- fluoro
  modified_base 10: mod_base = OTHER; note = 2'- fluoro
  modified_base 11: mod_base = OTHER; note = 2'- fluoro
  modified_base 12: mod_base = OTHER; note = 2'-O- methyl
  modified_base 13: mod_base = cm
  modified_base 14: mod_base = cm
  modified_base 15: mod_base = um
  modified_base 16: mod_base = cm
  modified_base 17: mod_base = OTHER; note = 2'-O- methyl
  modified_base 18: mod_base = gm
  modified_base 19: mod_base = OTHER; note = 2'-O- methyl
  modified_base 20: mod_base = OTHER; note = 2'-O- methyl
  modified_base 21: mod_base = OTHER; note = 2'-O- methyl
  misc_binding 21: bound_moiety = L96
gaataaaagcaacctcagaaa

SEQ ID NO: 477 - RNA, 23 nt, synthetic construct
  source 1..23: mol_type = other RNA
  modified_base 1: mod_base = um
  modified_base 2: mod_base = OTHER; note = 2'- fluoro
  modified_base 3: mod_base = um
  modified_base 4: mod_base = cm
  modified_base 5: mod_base = um
  modified_base 6: mod_base = OTHER; note = 2'- fluoro
  modified_base 7: mod_base = OTHER; note = 2'-O- methyl
  modified_base 8: mod_base = gm
  modified_base 9: mod_base = gm
  modified_base 10: mod_base = um
  modified_base 11: mod_base = um
  modified_base 12: mod_base = gm
  modified_base 13: mod_base = cm
  modified_base 14: mod_base = OTHER; note = 2'- fluoro
  modified_base 15: mod_base = um
  modified_base 16: mod_base = OTHER; note = 2'- fluoro
  modified_base 17: mod_base = um
  modified_base 18: mod_base = OTHER; note = 2'-O- methyl
  modified_base 19: mod_base = um
  modified_base 20: mod_base = um
  modified_base 21: mod_base = cm
  modified_base 22: mod_base = cm
  modified_base 23: mod_base = OTHER; note = 2'-O- methyl
tttctgaggttgcttttattcca

SEQ ID NO: 478 - RNA, 21 nt, synthetic construct
  source 1..21: mol_type = other RNA
  modified_base 1: mod_base = gm
  modified_base 2: mod_base = OTHER; note = 2'-O- methyl
  modified_base 3: mod_base = OTHER; note = 2'-O- methyl
  modified_base 4: mod_base = cm
  modified_base 5: mod_base = OTHER; note = 2'-O- methyl
  modified_base 6: mod_base = OTHER; note = 2'-O- methyl
  modified_base 7: mod_base = OTHER; note = 2'-O- methyl
  modified_base 8: mod_base = OTHER; note = 2'-O- methyl
  modified_base 9: mod_base = OTHER; note = 2'- fluoro
  modified_base 10: mod_base = OTHER; note = 2'- fluoro
  modified_base 11: mod_base = OTHER; note = 2'- fluoro
  modified_base 12: mod_base = OTHER; note = 2'-O- methyl
  modified_base 13: mod_base = cm
  modified_base 14: mod_base = cm
  modified_base 15: mod_base = um
  modified_base 16: mod_base = cm
  modified_base 17: mod_base = OTHER; note = 2'-O- methyl
  modified_base 18: mod_base = gm
  modified_base 19: mod_base = OTHER; note = 2'-O- methyl
  modified_base 20: mod_base = OTHER; note = 2'-O- methyl
  modified_base 21: mod_base = OTHER; note = 2'-O- methyl
  misc_binding 21: bound_moiety = L96
gaacaaaagcaacctcagaaa

SEQ ID NO: 479 - RNA, 21 nt, synthetic construct
  source 1..21: mol_type = other RNA
  modified_base 1: mod_base = gm
  modified_base 2: mod_base = OTHER; note = 2'-O- methyl
  modified_base 3: mod_base = OTHER; note = 2'-O- methyl
  modified_base 4: mod_base = cm
  modified_base 5: mod_base = gm
  modified_base 6: mod_base = OTHER; note = 2'-O- methyl
  modified_base 7: mod_base = OTHER; note = 2'-O- methyl
  modified_base 8: mod_base = OTHER; note = 2'-O- methyl
  modified_base 9: mod_base = OTHER; note = 2'- fluoro
  modified_base 10: mod_base = OTHER; note = 2'- fluoro
  modified_base 11: mod_base = OTHER; note = 2'- fluoro
  modified_base 12: mod_base = OTHER; note = 2'-O- methyl
  modified_base 13: mod_base = cm
  modified_base 14: mod_base = cm
  modified_base 15: mod_base = um
  modified_base 16: mod_base = cm
  modified_base 17: mod_base = OTHER; note = 2'-O- methyl
  modified_base 18: mod_base = gm
  modified_base 19: mod_base = OTHER; note = 2'-O- methyl
  modified_base 20: mod_base = OTHER; note = 2'-O- methyl
  modified_base 21: mod_base = OTHER; note = 2'-O- methyl
  misc_binding 21: bound_moiety = L96
gaacgaaagtaacctcagaaa

SEQ ID NO: 480 - RNA, 23 nt, synthetic construct
  source 1..23: mol_type = other RNA
  modified_base 1: mod_base = um
  modified_base 2: mod_base = OTHER; note = 2'- fluoro
  modified_base 3: mod_base = um
  modified_base 4: mod_base = cm
  modified_base 5: mod_base = um
  modified_base 6: mod_base = OTHER; note = 2'- fluoro
  modified_base 7: mod_base = OTHER; note = 2'-O- methyl
  modified_base 8: mod_base = gm
  modified_base 9: mod_base = gm
  modified_base 10: mod_base = um
  modified_base 11: mod_base = um
  modified_base 12: mod_base = gm
  modified_base 13: mod_base = cm
  modified_base 14: mod_base = OTHER; note = 2'- fluoro
  modified_base 15: mod_base = um
  modified_base 16: mod_base = OTHER; note = 2'- fluoro
  modified_base 17: mod_base = cm
  modified_base 18: mod_base = gm
  modified_base 19: mod_base = um
  modified_base 20: mod_base = um
  modified_base 21: mod_base = cm
  modified_base 22: mod_base = um
  modified_base 23: mod_base = um
tttctgaggttgctttcgttctt

SEQ ID NO: 481 - RNA, 21 nt, synthetic construct
  source 1..21: mol_type = other RNA
  modified_base 1: mod_base = gm
  modified_base 2: mod_base = OTHER; note = 2'-O- methyl
  modified_base 3: mod_base = OTHER; note = 2'-O- methyl
  modified_base 4: mod_base = cm
  modified_base 5: mod_base = OTHER; note = 2'-O- methyl
  modified_base 6: mod_base = gm
  modified_base 7: mod_base = OTHER; note = 2'-O- methyl
  modified_base 8: mod_base = OTHER; note = 2'-O- methyl
  modified_base 9: mod_base = OTHER; note = 2'- fluoro
  modified_base 10: mod_base = OTHER; note = 2'- fluoro
  modified_base 11: mod_base = OTHER; note = 2'- fluoro
  modified_base 12: mod_base = OTHER; note = 2'-O- methyl
  modified_base 13: mod_base = cm
  modified_base 14: mod_base = cm
  modified_base 15: mod_base = um
  modified_base 16: mod_base = cm
  modified_base 17: mod_base = OTHER; note = 2'-O- methyl
  modified_base 18: mod_base = gm
  modified_base 19: mod_base = OTHER; note = 2'-O- methyl
  modified_base 20: mod_base = OTHER; note = 2'-O- methyl
  modified_base 21: mod_base = OTHER; note = 2'-O- methyl
  misc_binding 21: bound_moiety = L96
gaacagaagtaacctcagaaa

SEQ ID NO: 482 - RNA, 23 nt, synthetic construct
  source 1..23: mol_type = other RNA
  modified_base 1: mod_base = um
  modified_base 2: mod_base = OTHER; note = 2'- fluoro
  modified_base 3: mod_base = um
  modified_base 4: mod_base = cm
  modified_base 5: mod_base = um
  modified_base 6: mod_base = OTHER; note = 2'- fluoro
  modified_base 7: mod_base = OTHER; note = 2'-O- methyl
  modified_base 8: mod_base = gm
  modified_base 9: mod_base = gm
  modified_base 10: mod_base = um
  modified_base 11: mod_base = um
  modified_base 12: mod_base = gm
  modified_base 13: mod_base = cm
  modified_base 14: mod_base = OTHER; note = 2'- fluoro
  modified_base 15: mod_base = um
  modified_base 16: mod_base = OTHER; note = 2'- fluoro
  modified_base 17: mod_base = um
  modified_base 18: mod_base = gm
  modified_base 19: mod_base = um
  modified_base 20: mod_base = um
  modified_base 21: mod_base = cm
  modified_base 22: mod_base = um
  modified_base 23: mod_base = um
tttctgaggttgcttctgttctt

SEQ ID NO: 483 - RNA, 20 nt, synthetic construct
  source 1..20: mol_type = other RNA
  modified_base 1: mod_base = gm
  modified_base 2: mod_base = OTHER; note = 2'-O- methyl
  modified_base 3: mod_base = OTHER; note = 2'-O- methyl
  modified_base 4: mod_base = um
  modified_base 5: mod_base = OTHER; note = 2'-O- methyl
  modified_base 6: mod_base = OTHER; note = 2'-O- methyl
  modified_base 7: mod_base = OTHER; note = 2'-O- methyl
  modified_base 8: mod_base = OTHER; note = 2'- fluoro
  modified_base 9: mod_base = OTHER; note = 2'- fluoro
  modified_base 10: mod_base = OTHER; note = 2'- fluoro
  modified_base 11: mod_base = OTHER; note = 2'-O- methyl
  modified_base 12: mod_base = OTHER; note = 2'-O- methyl
  modified_base 13: mod_base = cm
  modified_base 14: mod_base = cm
  modified_base 15: mod_base = um
  modified_base 16: mod_base = cm
  modified_base 17: mod_base = OTHER; note = 2'-O- methyl
  modified_base 18: mod_base = gm
  modified_base 19: mod_base = OTHER; note = 2'-O- methyl
  modified_base 20: mod_base = OTHER; note = 2'-O- methyl
  misc_binding 20: bound_moiety = L96
gaataaaagcaacctcagaa

SEQ ID NO: 484 - RNA, 22 nt, synthetic construct
  source 1..22: mol_type = other RNA
  modified_base 1: mod_base = um
  modified_base 2: mod_base = OTHER; note = 2'- fluoro
  modified_base 3: mod_base = cm
  modified_base 4: mod_base = um
  modified_base 5: mod_base = gm
  modified_base 6: mod_base = OTHER; note = 2'- fluoro
  modified_base 7: mod_base = gm
  modified_base 8: mod_base = gm
  modified_base 9: mod_base = um
  modified_base 10: mod_base = um
  modified_base 11: mod_base = gm
  modified_base 12: mod_base = cm
  modified_base 13: mod_base = um
  modified_base 14: mod_base = OTHER; note = 2'- fluoro
  modified_base 15: mod_base = um
  modified_base 16: mod_base = OTHER; note = 2'- fluoro
  modified_base 17: mod_base = OTHER; note = 2'-O- methyl
  modified_base 18: mod_base = um
  modified_base 19: mod_base = um
  modified_base 20: mod_base = cm
  modified_base 21: mod_base = um
  modified_base 22: mod_base = um
ttctgaggttgcttttattctt

SEQ ID NO: 485 - RNA, 19 nt, synthetic construct
  source 1..19: mol_type = other RNA
  modified_base 1: mod_base = cm
  modified_base 2: mod_base = OTHER; note = 2'-O- methyl
  modified_base 3: mod_base = OTHER; note = 2'-O- methyl
  modified_base 4: mod_base = OTHER; note = 2'-O- methyl
  modified_base 5: mod_base = OTHER; note = 2'- fluoro
  modified_base 6: mod_base = gm
  modified_base 7: mod_base = OTHER; note = 2'- fluoro
  modified_base 8: mod_base = OTHER; note = 2'- fluoro
  modified_base 9: mod_base = OTHER; note = 2'- fluoro
  modified_base 10: mod_base = cm
  modified_base 11: mod_base = cm
  modified_base 12: mod_base = um
  modified_base 13: mod_base = cm
  modified_base 14: mod_base = OTHER; note = 2'-O- methyl
  modified_base 15: mod_base = gm
  modified_base 16: mod_base = OTHER; note = 2'-O- methyl
  modified_base 17: mod_base = OTHER; note = 2'-O- methyl
  modified_base 18: mod_base = cm
  modified_base 19: mod_base = OTHER; note = 2'-O- methyl
  misc_binding 19: bound_moiety = L96
caaaagcaacctcagaaca

SEQ ID NO: 486 - RNA, 21 nt, synthetic construct
  source 1..21: mol_type = other RNA
  modified_base 1: mod_base = um
  modified_base 2: mod_base = OTHER; note = 2'- fluoro
  modified_base 3: mod_base = um
  modified_base 4: mod_base = um
  modified_base 5: mod_base = cm
  modified_base 6: mod_base = OTHER; note = 2'- fluoro
  modified_base 7: mod_base = gm
  modified_base 8: mod_base = OTHER; note = 2'- fluoro
  modified_base 9: mod_base = OTHER; note = 2'- fluoro
  modified_base 10: mod_base = gm
  modified_base 11: mod_base = um
  modified_base 12: mod_base = um
  modified_base 13: mod_base = gm
  modified_base 14: mod_base = OTHER; note = 2'- fluoro
  modified_base 15: mod_base = um
  modified_base 16: mod_base = OTHER; note = 2'- fluoro
  modified_base 17: mod_base = um
  modified_base 18: mod_base = um
  modified_base 19: mod_base = gm
  modified_base 20: mod_base = um
  modified_base 21: mod_base = um
tgttctgaggttgcttttgtt

SEQ ID NO: 487 - RNA, 21 nt, synthetic construct
  source 1..21: mol_type = other RNA
  modified_base 1: mod_base = um
  modified_base 2: mod_base = OTHER; note = 2'- fluoro
  modified_base 3: mod_base = um
  modified_base 4: mod_base = um
  modified_base 5: mod_base = cm
  modified_base 6: mod_base = OTHER; note = 2'- fluoro
  modified_base 7: mod_base = gm
  modified_base 8: mod_base = OTHER; note = 2'-O- methyl
  modified_base 9: mod_base = gm
  modified_base 10: mod_base = gm
  modified_base 11: mod_base = um
  modified_base 12: mod_base = um
  modified_base 13: mod_base = gm
  modified_base 14: mod_base = OTHER; note = 2'- fluoro
  modified_base 15: mod_base = um
  modified_base 16: mod_base = OTHER; note = 2'- fluoro
  modified_base 17: mod_base = um
  modified_base 18: mod_base = um
  modified_base 19: mod_base = gm
  modified_base 20: mod_base = um
  modified_base 21: mod_base = um
tgttctgaggttgcttttgtt

SEQ ID NO: 488 - RNA, 19 nt, synthetic construct
  source 1..19: mol_type = other RNA
  modified_base 1: mod_base = cm
  modified_base 2: mod_base = OTHER; note = 2'-O- methyl
  modified_base 3: mod_base = OTHER; note = 2'-O- methyl
  modified_base 4: mod_base = gm
  modified_base 5: mod_base = OTHER; note = 2'- fluoro
  modified_base 6: mod_base = gm
  modified_base 7: mod_base = OTHER; note = 2'- fluoro
  modified_base 8: mod_base = OTHER; note = 2'- fluoro
  modified_base 9: mod_base = OTHER; note = 2'- fluoro
  modified_base 10: mod_base = cm
  modified_base 11: mod_base = cm
  modified_base 12: mod_base = um
  modified_base 13: mod_base = cm
  modified_base 14: mod_base = OTHER; note = 2'-O- methyl
  modified_base 15: mod_base = gm
  modified_base 16: mod_base = OTHER; note = 2'-O- methyl
  modified_base 17: mod_base = OTHER; note = 2'-O- methyl
  modified_base 18: mod_base = cm
  modified_base 19: mod_base = OTHER; note = 2'-O- methyl
  misc_binding 19: bound_moiety = L96
caagagcaacctcagaaca

SEQ ID NO: 489 - RNA, 21 nt, synthetic construct
  source 1..21: mol_type = other RNA
  modified_base 1: mod_base = um
  modified_base 2: mod_base = OTHER; note = 2'- fluoro
  modified_base 3: mod_base = um
  modified_base 4: mod_base = um
  modified_base 5: mod_base = cm
  modified_base 6: mod_base = OTHER; note = 2'- fluoro
  modified_base 7: mod_base = gm
  modified_base 8: mod_base = OTHER; note = 2'-O- methyl
  modified_base 9: mod_base = gm
  modified_base 10: mod_base = gm
  modified_base 11: mod_base = um
  modified_base 12: mod_base = um
  modified_base 13: mod_base = gm
  modified_base 14: mod_base = OTHER; note = 2'- fluoro
  modified_base 15: mod_base = um
  modified_base 16: mod_base = OTHER; note = 2'- fluoro
  modified_base 17: mod_base = um
  modified_base 18: mod_base = um
  modified_base 19: mod_base = gm
  modified_base 20: mod_base = um
  modified_base 21: mod_base = um
tgttctgaggttgctcttgtt

SEQ ID NO: 490 - RNA, 19 nt, synthetic construct
  source 1..19: mol_type = other RNA
  modified_base 1: mod_base = cm
  modified_base 2: mod_base = OTHER; note = 2'-O- methyl
  modified_base 3: mod_base = OTHER; note = 2'-O- methyl
  modified_base 4: mod_base = OTHER; note = 2'-O- methyl
  modified_base 5: mod_base = OTHER; note = 2'-O- methyl
  modified_base 6: mod_base = gm
  modified_base 7: mod_base = OTHER; note = 2'- fluoro
  modified_base 8: mod_base = OTHER; note = 2'- fluoro
  modified_base 9: mod_base = OTHER; note = 2'- fluoro
  modified_base 10: mod_base = cm
  modified_base 11: mod_base = cm
  modified_base 12: mod_base = um
  modified_base 13: mod_base = cm
  modified_base 14: mod_base = OTHER; note = 2'-O- methyl
  modified_base 15: mod_base = gm
  modified_base 16: mod_base = OTHER; note = 2'-O- methyl
  modified_base 17: mod_base = OTHER; note = 2'-O- methyl
  modified_base 18: mod_base = cm
  modified_base 19: mod_base = OTHER; note = 2'-O- methyl
  misc_binding 19: bound_moiety = L96
caaaagcaacctcagaaca

SEQ ID NO: 491 - RNA, 19 nt, synthetic construct
  source 1..19: mol_type = other RNA
  modified_base 1: mod_base = cm
  modified_base 2: mod_base = OTHER; note = 2'-O- methyl
  modified_base 3: mod_base = OTHER; note = 2'-O- methyl
  modified_base 4: mod_base = OTHER; note = 2'-O- methyl
  modified_base 5: mod_base = OTHER; note = 2'-O- methyl
  modified_base 6: mod_base = gm
  modified_base 7: mod_base = OTHER; note = 2'- fluoro
  modified_base 8: mod_base = OTHER; note = 2'- fluoro
  modified_base 9: mod_base = OTHER; note = 2'- fluoro
  modified_base 10: mod_base = um
  modified_base 11: mod_base = cm
  modified_base 12: mod_base = um
  modified_base 13: mod_base = cm
  modified_base 14: mod_base = OTHER; note = 2'-O- methyl
  modified_base 15: mod_base = gm
  modified_base 16: mod_base = OTHER; note = 2'-O- methyl
  modified_base 17: mod_base = OTHER; note = 2'-O- methyl
  modified_base 18: mod_base = cm
  modified_base 19: mod_base = OTHER; note = 2'-O- methyl
  misc_binding 19: bound_moiety = L96
caaaagcaatctcagaaca

SEQ ID NO: 492 - RNA, 19 nt, synthetic construct
  source 1..19: mol_type = other RNA
  modified_base 1: mod_base = cm
  modified_base 2: mod_base = OTHER; note = 2'-O- methyl
  modified_base 3: mod_base = OTHER; note = 2'-O- methyl
  modified_base 4: mod_base = gm
  modified_base 5: mod_base = OTHER; note = 2'-O- methyl
  modified_base 6: mod_base = gm
  modified_base 7: mod_base = OTHER; note = 2'- fluoro
  modified_base 8: mod_base = OTHER; note = 2'- fluoro
  modified_base 9: mod_base = OTHER; note = 2'- fluoro
  modified_base 10: mod_base = cm
  modified_base 11: mod_base = cm
  modified_base 12: mod_base = um
  modified_base 13: mod_base = cm
  modified_base 14: mod_base = OTHER; note = 2'-O- methyl
  modified_base 15: mod_base = gm
  modified_base 16: mod_base = OTHER; note = 2'-O- methyl
  modified_base 17: mod_base = OTHER; note = 2'-O- methyl
  modified_base 18: mod_base = cm
  modified_base 19: mod_base = OTHER; note = 2'-O- methyl
  misc_binding 19: bound_moiety = L96
caagagcaacctcagaaca

SEQ ID NO: 493 - RNA, 21 nt, synthetic construct
  source 1..21: mol_type = other RNA
  modified_base 1: mod_base = OTHER; note = 2'-O- methyl
  modified_base 2: mod_base = gm
  modified_base 3: mod_base = um
  modified_base 4: mod_base = um
  modified_base 5: mod_base = cm
  modified_base 6: mod_base = um
  modified_base 7: mod_base = OTHER; note = 2'- fluoro
  modified_base 8: mod_base = gm
  modified_base 9: mod_base = OTHER; note = 2'- fluoro
  modified_base 10: mod_base = OTHER; note = 2'- fluoro
  modified_base 11: mod_base = OTHER; note = 2'- fluoro
  modified_base 12: mod_base = um
  modified_base 13: mod_base = OTHER; note = 2'-O- methyl
  modified_base 14: mod_base = OTHER; note = 2'-O- methyl
  modified_base 15: mod_base = OTHER; note = 2'-O- methyl
  modified_base 16: mod_base = OTHER; note = 2'-O- methyl
  modified_base 17: mod_base = gm
  modified_base 18: mod_base = cm
  modified_base 19: mod_base = OTHER; note = 2'-O- methyl
  modified_base 20: mod_base = OTHER; note = 2'-O- methyl
  modified_base 21: mod_base = OTHER; note = 2'-O- methyl
  misc_binding 21: bound_moiety = L96
agttcttggaataaaagcaaa

SEQ ID NO: 494 - RNA, 23 nt, synthetic construct
  source 1..23: mol_type = other RNA
  modified_base 1: mod_base = um
  modified_base 2: mod_base = OTHER; note = 2'- fluoro
  modified_base 3: mod_base = um
  modified_base 4: mod_base = gm
  modified_base 5: mod_base = cm
  modified_base 6: mod_base = OTHER; note = 2'- fluoro
  modified_base 7: mod_base = um
  modified_base 8: mod_base = um
  modified_base 9: mod_base = um
  modified_base 10: mod_base = OTHER; note = 2'-O- methyl
  modified_base 11: mod_base = um
  modified_base 12: mod_base = um
  modified_base 13: mod_base = cm
  modified_base 14: mod_base = OTHER; note = 2'- fluoro
  modified_base 15: mod_base = OTHER; note = 2'-O- methyl
  modified_base 16: mod_base = OTHER; note = 2'- fluoro
  modified_base 17: mod_base = gm
  modified_base 18: mod_base = OTHER; note = 2'-O- methyl
  modified_base 19: mod_base = OTHER; note = 2'-O- methyl
  modified_base 20: mod_base = cm
  modified_base 21: mod_base = um
  modified_base 22: mod_base = cm
  modified_base 23: mod_base = um
tttgcttttattccaagaactct

SEQ ID NO: 495 - RNA, 23 nt, synthetic construct
  source 1..23: mol_type = other RNA
  modified_base 1: mod_base = um
  modified_base 2: mod_base = OTHER; note = 2'- fluoro
  modified_base 3: mod_base = um
  modified_base 4: mod_base = gm
  modified_base 5: mod_base = cm
  modified_base 6: mod_base = OTHER; note = 2'- fluoro
  modified_base 7: mod_base = um
  modified_base 8: mod_base = OTHER; note = 2'- fluoro
  modified_base 9: mod_base = OTHER; note = 2'- fluoro
  modified_base 10: mod_base = OTHER; note = 2'-O- methyl
  modified_base 11: mod_base = um
  modified_base 12: mod_base = um
  modified_base 13: mod_base = cm
  modified_base 14: mod_base = OTHER; note = 2'- fluoro
  modified_base 15: mod_base = OTHER; note = 2'-O- methyl
  modified_base 16: mod_base = OTHER; note = 2'- fluoro
  modified_base 17: mod_base = gm
  modified_base 18: mod_base = OTHER; note = 2'-O- methyl
  modified_base 19: mod_base = OTHER; note = 2'-O- methyl
  modified_base 20: mod_base = cm
  modified_base 21: mod_base = um
  modified_base 22: mod_base = cm
  modified_base 23: mod_base = um
tttgcttttattccaagaactct

SEQ ID NO: 496 - RNA, 21 nt, synthetic construct
  source 1..21: mol_type = other RNA
  modified_base 1: mod_base = OTHER; note = 2'-O- methyl
  modified_base 2: mod_base = gm
  modified_base 3: mod_base = um
  modified_base 4: mod_base = um
  modified_base 5: mod_base = cm
  modified_base 6: mod_base = um
  modified_base 7: mod_base = um
  modified_base 8: mod_base = gm
  modified_base 9: mod_base = OTHER; note = 2'- fluoro
  modified_base 10: mod_base = OTHER; note = 2'- fluoro
  modified_base 11: mod_base = OTHER; note = 2'- fluoro
  modified_base 12: mod_base = um
  modified_base 13: mod_base = OTHER; note = 2'-O- methyl
  modified_base 14: mod_base = OTHER; note = 2'-O- methyl
  modified_base 15: mod_base = OTHER; note = 2'-O- methyl
  modified_base 16: mod_base = OTHER; note = 2'-O- methyl
  modified_base 17: mod_base = gm
  modified_base 18: mod_base = cm
  modified_base 19: mod_base = OTHER; note = 2'-O- methyl
  modified_base 20: mod_base = OTHER; note = 2'-O- methyl
  modified_base 21: mod_base = OTHER; note = 2'-O- methyl
  misc_binding 21: bound_moiety = L96
agttcttggaataaaagcaaa

SEQ ID NO: 497 - RNA, 21 nt, synthetic construct
  source 1..21: mol_type = other RNA
  modified_base 1: mod_base = OTHER; note = 2'-O- methyl
  modified_base 2: mod_base = gm
  modified_base 3: mod_base = um
  modified_base 4: mod_base = um
  modified_base 5: mod_base = cm
  modified_base 6: mod_base = OTHER; note = 2'- deoxyribose
  modified_base 7: mod_base = OTHER; note = 2'- fluoro
  modified_base 8: mod_base = gm
  modified_base 9: mod_base = OTHER; note = 2'- fluoro
  modified_base 10: mod_base = OTHER; note = 2'- fluoro
  modified_base 11: mod_base = OTHER; note = 2'- fluoro
  modified_base 12: mod_base = um
  modified_base 13: mod_base = OTHER; note = 2'-O- methyl
  modified_base 14: mod_base = OTHER; note = 2'-O- methyl
  modified_base 15: mod_base = OTHER; note = 2'-O- methyl
  modified_base 16: mod_base = OTHER; note = 2'-O- methyl
  modified_base 17: mod_base = gm
  modified_base 18: mod_base = cm
  modified_base 19: mod_base = OTHER; note = 2'-O- methyl
  modified_base 20: mod_base = OTHER; note = 2'-O- methyl
  modified_base 21: mod_base = um
  misc_binding 21: bound_moiety = L96
agttcttggaataaaagcaat

SEQ ID NO: 498 - RNA, 21 nt, synthetic construct
  source 1..21: mol_type = other RNA
  modified_base 1: mod_base = OTHER; note = 2'-O- methyl
  modified_base 2: mod_base = gm
  modified_base 3: mod_base = um
  modified_base 4: mod_base = um
  modified_base 5: mod_base = cm
  modified_base 6: mod_base = OTHER; note = 2'- deoxyribose
  modified_base 7: mod_base = um
  modified_base 8: mod_base = gm
  modified_base 9: mod_base = OTHER; note = 2'- fluoro
  modified_base 10: mod_base = OTHER; note = 2'- fluoro
  modified_base 11: mod_base = OTHER; note = 2'- fluoro
  modified_base 12: mod_base = um
  modified_base 13: mod_base = OTHER; note = 2'-O- methyl
  modified_base 14: mod_base = OTHER; note = 2'-O- methyl
  modified_base 15: mod_base = OTHER; note = 2'-O- methyl
  modified_base 16: mod_base = OTHER; note = 2'-O- methyl
  modified_base 17: mod_base = gm
  modified_base 18: mod_base = cm
  modified_base 19: mod_base = OTHER; note = 2'-O- methyl
  modified_base 20: mod_base = OTHER; note = 2'-O- methyl
  modified_base 21: mod_base = um
  misc_binding 21: bound_moiety = L96
agttcttggaataaaagcaat

SEQ ID NO: 499 - RNA, 21 nt, synthetic construct
  source 1..21: mol_type = other RNA
  modified_base 1: mod_base = gm
  modified_base 2: mod_base = gm
  modified_base 3: mod_base = um
  modified_base 4: mod_base = um
  modified_base 5: mod_base = cm
  modified_base 6: mod_base = um
  modified_base 7: mod_base = OTHER; note = 2'- fluoro
  modified_base 8: mod_base = gm
  modified_base 9: mod_base = OTHER; note = 2'- fluoro
  modified_base 10: mod_base = OTHER; note = 2'- fluoro
  modified_base 11: mod_base = OTHER; note = 2'- fluoro
  modified_base 12: mod_base = um
  modified_base 13: mod_base = OTHER; note = 2'-O- methyl
  modified_base 14: mod_base = OTHER; note = 2'-O- methyl
  modified_base 15: mod_base = OTHER; note = 2'-O- methyl
  modified_base 16: mod_base = OTHER; note = 2'-O- methyl
  modified_base 17: mod_base = gm
  modified_base 18: mod_base = cm
  modified_base 19: mod_base = OTHER; note = 2'-O- methyl
  modified_base 20: mod_base = OTHER; note = 2'-O- methyl
  modified_base 21: mod_base = um
  misc_binding 21: bound_moiety = L96
ggttcttggaataaaagcaat

SEQ ID NO: 500 - RNA, 21 nt, synthetic construct
  source 1..21: mol_type = other RNA
  modified_base 1: mod_base = gm
  modified_base 2: mod_base = gm
  modified_base 3: mod_base = um
  modified_base 4: mod_base = um
  modified_base 5: mod_base = cm
  modified_base 6: mod_base = um
  modified_base 7: mod_base = um
  modified_base 8: mod_base = gm
  modified_base 9: mod_base = OTHER; note = 2'- fluoro
  modified_base 10: mod_base = OTHER; note = 2'- fluoro
  modified_base 11: mod_base = OTHER; note = 2'- fluoro
  modified_base 12: mod_base = um
  modified_base 13: mod_base = OTHER; note = 2'-O- methyl
  modified_base 14: mod_base = OTHER; note = 2'-O- methyl
  modified_base 15: mod_base = OTHER; note = 2'-O- methyl
  modified_base 16: mod_base = OTHER; note = 2'-O- methyl
  modified_base 17: mod_base = gm
  modified_base 18: mod_base = cm
  modified_base 19: mod_base = OTHER; note = 2'-O- methyl
  modified_base 20: mod_base = OTHER; note = 2'-O- methyl
  modified_base 21: mod_base = um
  misc_binding 21: bound_moiety = L96
ggttcttggaataaaagcaat

SEQ ID NO: 501 - RNA, 21 nt, synthetic construct
  source 1..21: mol_type = other RNA
  modified_base 2: mod_base = gm
  modified_base 3: mod_base = um
  modified_base 4: mod_base = um
  modified_base 5: mod_base = cm
  modified_base 6: mod_base = um
  modified_base 7: mod_base = OTHER; note = 2'- fluoro
  modified_base 8: mod_base = gm
  modified_base 9: mod_base = OTHER; note = 2'- fluoro
  modified_base 10: mod_base = OTHER; note = 2'- fluoro
  modified_base 11: mod_base = OTHER; note = 2'- fluoro
  modified_base 12: mod_base = um
  modified_base 13: mod_base = OTHER; note = 2'-O- methyl
  modified_base 14: mod_base = OTHER; note = 2'-O- methyl
  modified_base 15: mod_base = OTHER; note = 2'-O- methyl
  modified_base 16: mod_base = OTHER; note = 2'-O- methyl
  modified_base 17: mod_base = gm
  modified_base 18: mod_base = cm
  modified_base 19: mod_base = OTHER; note = 2'-O- methyl
  modified_base 20: mod_base = OTHER; note = 2'-O- methyl
  modified_base 21: mod_base = um
  misc_binding 21: bound_moiety = L96
agttcttggaataaaagcaat

SEQ ID NO: 502 - RNA, 21 nt, synthetic construct
  source 1..21: mol_type = other RNA
  modified_base 2: mod_base = gm
  modified_base 3: mod_base = um
  modified_base 4: mod_base = um
  modified_base 5: mod_base = cm
  modified_base 6: mod_base = um
  modified_base 7: mod_base = um
  modified_base 8: mod_base = gm
  modified_base 9: mod_base = OTHER; note = 2'- fluoro
  modified_base 10: mod_base = OTHER; note = 2'- fluoro
  modified_base 11: mod_base = OTHER; note = 2'- fluoro
  modified_base 12: mod_base = um
  modified_base 13: mod_base = OTHER; note = 2'-O- methyl
  modified_base 14: mod_base = OTHER; note = 2'-O- methyl
  modified_base 15: mod_base = OTHER; note = 2'-O- methyl
  modified_base 16: mod_base = OTHER; note = 2'-O- methyl
  modified_base 17: mod_base = gm
  modified_base 18: mod_base = cm
  modified_base 19: mod_base = OTHER; note = 2'-O- methyl
  modified_base 20: mod_base = OTHER; note = 2'-O- methyl
  modified_base 21: mod_base = um
  misc_binding 21: bound_moiety = L96
agttcttggaataaaagcaat

SEQ ID NO: 503 - RNA, 23 nt, synthetic construct
  source 1..23: mol_type = other RNA
  modified_base 1: mod_base = OTHER; note = 2'-O- methyl
  modified_base 2: mod_base = OTHER; note = 2'- fluoro
  modified_base 3: mod_base = um
  modified_base 4: mod_base = gm
  modified_base 5: mod_base = cm
  modified_base 6: mod_base = OTHER; note = 2'- fluoro
  modified_base 7: mod_base = um
  modified_base 8: mod_base = um
  modified_base 9: mod_base = um
  modified_base 10: mod_base = OTHER; note = 2'-O- methyl
  modified_base 11: mod_base = um
  modified_base 12: mod_base = um
  modified_base 13: mod_base = cm
  modified_base 14: mod_base = OTHER; note = 2'- fluoro
  modified_base 15: mod_base = OTHER; note = 2'-O- methyl
  modified_base 16: mod_base = OTHER; note = 2'- fluoro
  modified_base 17: mod_base = gm
  modified_base 18: mod_base = OTHER; note = 2'-O- methyl
  modified_base 19: mod_base = OTHER; note = 2'-O- methyl
  modified_base 20: mod_base = cm
  modified_base 21: mod_base = um
  modified_base 23: mod_base = um
attgcttttattccaagaactct

SEQ ID NO: 504 - RNA, 23 nt, synthetic construct
  source 1..23: mol_type = other RNA
  modified_base 1: mod_base = OTHER; note = 2'-O- methyl
  modified_base 2: mod_base = OTHER; note = 2'- fluoro
  modified_base 3: mod_base = um
  modified_base 4: mod_base = gm
  modified_base 5: mod_base = cm
  modified_base 6: mod_base = OTHER; note = 2'- fluoro
  modified_base 7: mod_base = um
  modified_base 8: mod_base = OTHER; note = 2'- fluoro
  modified_base 9: mod_base = OTHER; note = 2'- fluoro
  modified_base 10: mod_base = OTHER; note = 2'-O- methyl
  modified_base 11: mod_base = um
  modified_base 12: mod_base = um
  modified_base 13: mod_base = cm
  modified_base 14: mod_base = OTHER; note = 2'- fluoro
  modified_base 15: mod_base = OTHER; note = 2'-O- methyl
  modified_base 16: mod_base = OTHER; note = 2'- fluoro
  modified_base 17: mod_base = gm
  modified_base 18: mod_base = OTHER; note = 2'-O- methyl
  modified_base 19: mod_base = OTHER; note = 2'-O- methyl
  modified_base 20: mod_base = cm
  modified_base 21: mod_base = um
  modified_base 23: mod_base = um
attgcttttattccaagaactct

SEQ ID NO: 505 - RNA, 23 nt, synthetic construct
  source 1..23: mol_type = other RNA
  modified_base 1: mod_base = OTHER; note = 2'-O- methyl
  modified_base 2: mod_base = OTHER; note = 2'- fluoro
  modified_base 3: mod_base = um
  modified_base 4: mod_base = gm
  modified_base 5: mod_base = cm
  modified_base 6: mod_base = OTHER; note = 2'- fluoro
  modified_base 7: mod_base = um
  modified_base 8: mod_base = um
  modified_base 9: mod_base = um
  modified_base 10: mod_base = OTHER; note = 2'-O- methyl
  modified_base 11: mod_base = um
  modified_base 12: mod_base = um
  modified_base 13: mod_base = cm
  modified_base 14: mod_base = OTHER; note = 2'- fluoro
  modified_base 15: mod_base = OTHER; note = 2'-O- methyl
  modified_base 16: mod_base = OTHER; note = 2'- fluoro
  modified_base 17: mod_base = gm
  modified_base 18: mod_base = OTHER; note = 2'-O- methyl
  modified_base 19: mod_base = OTHER; note = 2'-O- methyl
  modified_base 20: mod_base = cm
  modified_base 21: mod_base = um
  modified_base 23: mod_base = um
  modified_base 22: mod_base = OTHER; note = 2'-O-methyl Inosine
attgcttttattccaagaactnt

SEQ ID NO: 506 - RNA, 23 nt, synthetic construct
  source 1..23: mol_type = other RNA
  modified_base 1: mod_base = OTHER; note = 2'-O- methyl
  modified_base 2: mod_base = OTHER; note = 2'- fluoro
  modified_base 3: mod_base = um
  modified_base 4: mod_base = gm
  modified_base 5: mod_base = cm
  modified_base 6: mod_base = OTHER; note = 2'- fluoro
  modified_base 7: mod_base = um
  modified_base 8: mod_base = OTHER; note = 2'- fluoro
  modified_base 9: mod_base = OTHER; note = 2'- fluoro
  modified_base 10: mod_base = OTHER; note = 2'-O- methyl
  modified_base 11: mod_base = um
  modified_base 12: mod_base = um
  modified_base 13: mod_base = cm
  modified_base 14: mod_base = OTHER; note = 2'- fluoro
  modified_base 15: mod_base = OTHER; note = 2'-O- methyl
  modified_base 16: mod_base = OTHER; note = 2'- fluoro
  modified_base 17: mod_base = gm
  modified_base 18: mod_base = OTHER; note = 2'-O- methyl
  modified_base 19: mod_base = OTHER; note = 2'-O- methyl
  modified_base 20: mod_base = cm
  modified_base 21: mod_base = um
  modified_base 23: mod_base = um
  modified_base 22: mod_base = OTHER; note = 2'-O-methyl Inosine
attgcttttattccaagaactnt

SEQ ID NO: 507 - RNA, 20 nt, synthetic construct
  source 1..20: mol_type = other RNA
  modified_base 1: mod_base = gm
  modified_base 2: mod_base = um
  modified_base 3: mod_base = um
  modified_base 4: mod_base = cm
  modified_base 5: mod_base = um
  modified_base 6: mod_base = OTHER; note = 2'- fluoro
  modified_base 7: mod_base = gm
  modified_base 8: mod_base = OTHER; note = 2'- fluoro
  modified_base 9: mod_base = OTHER; note = 2'- fluoro
  modified_base 10: mod_base = OTHER; note = 2'- fluoro
  modified_base 11: mod_base = um
  modified_base 12: mod_base = OTHER; note = 2'-O- methyl
  modified_base 13: mod_base = OTHER; note = 2'-O- methyl
  modified_base 14: mod_base = OTHER; note = 2'-O- methyl
  modified_base 15: mod_base = OTHER; note = 2'-O- methyl
  modified_base 16: mod_base = gm
  modified_base 17: mod_base = cm
  modified_base 18: mod_base = OTHER; note = 2'-O- methyl
  modified_base 19: mod_base = OTHER; note = 2'-O- methyl
  modified_base 20: mod_base = OTHER; note = 2'-O- methyl
  misc_binding 20: bound_moiety = L96
gttcttggaataaaagcaaa

SEQ ID NO: 508 - RNA, 22 nt, synthetic construct
  source 1..22: mol_type = other RNA
  modified_base 1: mod_base = um
  modified_base 2: mod_base = OTHER; note = 2'- fluoro
  modified_base 3: mod_base = um
  modified_base 4: mod_base = gm
  modified_base 5: mod_base = cm
  modified_base 6: mod_base = OTHER; note = 2'- fluoro
  modified_base 7: mod_base = um
  modified_base 8: mod_base = um
  modified_base 9: mod_base = um
  modified_base 10: mod_base = OTHER; note = 2'-O- methyl
  modified_base 11: mod_base = um
  modified_base 12: mod_base = um
  modified_base 13: mod_base = cm
  modified_base 14: mod_base = OTHER; note = 2'- fluoro
  modified_base 15: mod_base = OTHER; note = 2'-O- methyl
  modified_base 16: mod_base = OTHER; note = 2'- fluoro
  modified_base 17: mod_base = gm
  modified_base 18: mod_base = OTHER; note = 2'-O- methyl
  modified_base 19: mod_base = OTHER; note = 2'-O- methyl
  modified_base 20: mod_base = cm
  modified_base 21: mod_base = um
  modified_base 22: mod_base = cm
tttgcttttattccaagaactc

SEQ ID NO: 509 - RNA, 22 nt, synthetic construct
  source 1..22: mol_type = other RNA
  modified_base 1: mod_base = um
  modified_base 2: mod_base = OTHER; note = 2'- fluoro
  modified_base 3: mod_base = um
  modified_base 4: mod_base = gm
  modified_base 5: mod_base = cm
  modified_base 6: mod_base = OTHER; note = 2'- fluoro
  modified_base 7: mod_base = um
  modified_base 8: mod_base = OTHER; note = 2'- fluoro
  modified_base 9: mod_base = OTHER; note = 2'- fluoro
  modified_base 10: mod_base = OTHER; note = 2'-O- methyl
  modified_base 11: mod_base = um
  modified_base 12: mod_base = um
  modified_base 13: mod_base = cm
  modified_base 14: mod_base = OTHER; note = 2'- fluoro
  modified_base 15: mod_base = OTHER; note = 2'-O- methyl
  modified_base 16: mod_base = OTHER; note = 2'- fluoro
  modified_base 17: mod_base = gm
  modified_base 18: mod_base = OTHER; note = 2'-O- methyl
  modified_base 19: mod_base = OTHER; note = 2'-O- methyl
  modified_base 20: mod_base = cm
  modified_base 21: mod_base = um
  modified_base 22: mod_base = cm
tttgcttttattccaagaactc

SEQ ID NO: 510 - RNA, 20 nt, synthetic construct
  source 1..20: mol_type = other RNA
  modified_base 1: mod_base = gm
  modified_base 2: mod_base = um
  modified_base 3: mod_base = um
  modified_base 4: mod_base = cm
  modified_base 5: mod_base = um
  modified_base 6: mod_base = um
  modified_base 7: mod_base = gm
  modified_base 8: mod_base = OTHER; note = 2'- fluoro
  modified_base 9: mod_base = OTHER; note = 2'- fluoro
  modified_base 10: mod_base = OTHER; note = 2'- fluoro
  modified_base 11: mod_base = um
  modified_base 12: mod_base = OTHER; note = 2'-O- methyl
  modified_base 13: mod_base = OTHER; note = 2'-O- methyl
  modified_base 14: mod_base = OTHER; note = 2'-O- methyl
  modified_base 15: mod_base = OTHER; note = 2'-O- methyl
  modified_base 16: mod_base = gm
  modified_base 17: mod_base = cm
  modified_base 18: mod_base = OTHER; note = 2'-O- methyl
  modified_base 19: mod_base = OTHER; note = 2'-O- methyl
  modified_base 20: mod_base = OTHER; note = 2'-O- methyl
  misc_binding 20: bound_moiety = L96
gttcttggaataaaagcaaa

SEQ ID NO: 511 - RNA, 20 nt, synthetic construct
  source 1..20: mol_type = other RNA
  modified_base 1: mod_base = gm
  modified_base 2: mod_base = um
  modified_base 3: mod_base = um
  modified_base 4: mod_base = cm
  modified_base 5: mod_base = OTHER; note = 2'- deoxyribose
  modified_base 6: mod_base = OTHER; note = 2'- fluoro
  modified_base 7: mod_base = gm
  modified_base 8: mod_base = OTHER; note = 2'- fluoro
  modified_base 9: mod_base = OTHER; note = 2'- fluoro
  modified_base 10: mod_base = OTHER; note = 2'- fluoro
  modified_base 11: mod_base = um
  modified_base 12: mod_base = OTHER; note = 2'-O- methyl
  modified_base 13: mod_base = OTHER; note = 2'-O- methyl
  modified_base 14: mod_base = OTHER; note = 2'-O- methyl
  modified_base 15: mod_base = OTHER; note = 2'-O- methyl
  modified_base 16: mod_base = gm
  modified_base 17: mod_base = cm
  modified_base 18: mod_base = OTHER; note = 2'-O- methyl
  modified_base 19: mod_base = OTHER; note = 2'-O- methyl
  modified_base 20: mod_base = um
  misc_binding 20: bound_moiety = L96
gttcttggaataaaagcaat

SEQ ID NO: 512 - RNA, 22 nt, synthetic construct
  source 1..22: mol_type = other RNA
  modified_base 1: mod_base = OTHER; note = 2'-O- methyl
  modified_base 2: mod_base = OTHER; note = 2'- fluoro
  modified_base 3: mod_base = um
  modified_base 4: mod_base = gm
  modified_base 5: mod_base = cm
  modified_base 6: mod_base = OTHER; note = 2'- fluoro
  modified_base 7: mod_base = um
  modified_base 8: mod_base = OTHER; note = 2'- fluoro
  modified_base 9: mod_base = OTHER; note = 2'- fluoro
  modified_base 10: mod_base = OTHER; note = 2'-O- methyl
  modified_base 11: mod_base = um
  modified_base 12: mod_base = um
  modified_base 13: mod_base = cm
  modified_base 14: mod_base = OTHER; note = 2'- fluoro
  modified_base 15: mod_base = OTHER; note = 2'-O- methyl
  modified_base 16: mod_base = OTHER; note = 2'- fluoro
  modified_base 17: mod_base = gm
  modified_base 18: mod_base = OTHER; note = 2'-O- methyl
  modified_base 19: mod_base = OTHER; note = 2'-O- methyl
  modified_base 20: mod_base = cm
  modified_base 21: mod_base = um
  modified_base 22: mod_base = cm
attgcttttattccaagaactc

SEQ ID NO: 513 - RNA, 20 nt, synthetic construct
  source 1..20: mol_type = other RNA
  modified_base 1: mod_base = gm
  modified_base 2: mod_base = um
  modified_base 3: mod_base = um
  modified_base 4: mod_base = cm
  modified_base 5: mod_base = OTHER; note = 2'- deoxyribose
  modified_base 6: mod_base = um
  modified_base 7: mod_base = gm
  modified_base 8: mod_base = OTHER; note = 2'- fluoro
  modified_base 9: mod_base = OTHER; note = 2'- fluoro
  modified_base 10: mod_base = OTHER; note = 2'- fluoro
  modified_base 11: mod_base = um
  modified_base 12: mod_base = OTHER; note = 2'-O- methyl
  modified_base 13: mod_base = OTHER; note = 2'-O- methyl
  modified_base 14: mod_base = OTHER; note = 2'-O- methyl
  modified_base 15: mod_base = OTHER; note = 2'-O- methyl
  modified_base 16: mod_base = gm
  modified_base 17: mod_base = cm
  modified_base 18: mod_base = OTHER; note = 2'-O- methyl
  modified_base 19: mod_base = OTHER; note = 2'-O- methyl
  modified_base 20: mod_base = um
  misc_binding 20: bound_moiety = L96
gttcttggaataaaagcaat

SEQ ID NO: 514 - RNA, 20 nt, synthetic construct
  source 1..20: mol_type = other RNA
  modified_base 2: mod_base = um
  modified_base 3: mod_base = um
  modified_base 4: mod_base = cm
  modified_base 5: mod_base = um
  modified_base 6: mod_base = OTHER; note = 2'- fluoro
  modified_base 7: mod_base = gm
  modified_base 8: mod_base = OTHER; note = 2'- fluoro
  modified_base 9: mod_base = OTHER; note = 2'- fluoro
  modified_base 10: mod_base = OTHER; note = 2'- fluoro
  modified_base 11: mod_base = um
  modified_base 12: mod_base = OTHER; note = 2'-O- methyl
  modified_base 13: mod_base = OTHER; note = 2'-O- methyl
  modified_base 14: mod_base = OTHER; note = 2'-O- methyl
  modified_base 15: mod_base = OTHER; note = 2'-O- methyl
  modified_base 16: mod_base = gm
  modified_base 17: mod_base = cm
  modified_base 18: mod_base = OTHER; note = 2'-O- methyl
  modified_base 19: mod_base = OTHER; note = 2'-O- methyl
  modified_base 20: mod_base = um
  misc_binding 20: bound_moiety = L96
gttcttggaataaaagcaat

SEQ ID NO: 515 - RNA, 20 nt, synthetic construct
  source 1..20: mol_type = other RNA
  modified_base 2: mod_base = um
  modified_base 3: mod_base = um
  modified_base 4: mod_base = cm
  modified_base 5: mod_base = um
  modified_base 6: mod_base = um
  modified_base 7: mod_base = gm
  modified_base 8: mod_base = OTHER; note = 2'- fluoro
  modified_base 9: mod_base = OTHER; note = 2'- fluoro
  modified_base 10: mod_base = OTHER; note = 2'- fluoro
  modified_base 11: mod_base = um
  modified_base 12: mod_base = OTHER; note = 2'-O- methyl
  modified_base 13: mod_base = OTHER; note = 2'-O- methyl
  modified_base 14: mod_base = OTHER; note = 2'-O- methyl
  modified_base 15: mod_base = OTHER; note = 2'-O- methyl
  modified_base 16: mod_base = gm
  modified_base 17: mod_base = cm
  modified_base 18: mod_base = OTHER; note = 2'-O- methyl
  modified_base 19: mod_base = OTHER; note = 2'-O- methyl
  modified_base 20: mod_base = um
  misc_binding 20: bound_moiety = L96
gttcttggaataaaagcaat

SEQ ID NO: 516 - RNA, 20 nt, synthetic construct
  source 1..20: mol_type = other RNA
  modified_base 1: mod_base = gm
  modified_base 2: mod_base = um
  modified_base 3: mod_base = um
  modified_base 4: mod_base = cm
  modified_base 5: mod_base = um
  modified_base 6: mod_base = OTHER; note = 2'- fluoro
  modified_base 7: mod_base = gm
  modified_base 8: mod_base = OTHER; note = 2'- fluoro
  modified_base 9: mod_base = OTHER; note = 2'- fluoro
  modified_base 10: mod_base = OTHER; note = 2'- fluoro
  modified_base 11: mod_base = um
  modified_base 12: mod_base = OTHER; note = 2'-O- methyl
  modified_base 13: mod_base = OTHER; note = 2'-O- methyl
  modified_base 14: mod_base = OTHER; note = 2'-O- methyl
  modified_base 15: mod_base = OTHER; note = 2'-O- methyl
  modified_base 16: mod_base = gm
  modified_base 17: mod_base = cm
  modified_base 18: mod_base = OTHER; note = 2'-O- methyl
  modified_base 19: mod_base = OTHER; note = 2'-O- methyl
  modified_base 20: mod_base = um
  misc_binding 20: bound_moiety = L96
gttcttggaataaaagcaat

SEQ ID NO: 517 - RNA, 22 nt, synthetic construct
  source 1..22: mol_type = other RNA
  modified_base 1: mod_base = OTHER; note = 2'-O- methyl
  modified_base 2: mod_base = OTHER; note = 2'- fluoro
  modified_base 3: mod_base = um
  modified_base 4: mod_base = gm
  modified_base 5: mod_base = cm
  modified_base 6: mod_base = OTHER; note = 2'- fluoro
  modified_base 7: mod_base = um
  modified_base 8: mod_base = um
  modified_base 9: mod_base = um
  modified_base 10: mod_base = OTHER; note = 2'-O- methyl
  modified_base 11: mod_base = um
  modified_base 12: mod_base = um
  modified_base 13: mod_base = cm
  modified_base 14: mod_base = OTHER; note = 2'- fluoro
  modified_base 15: mod_base = OTHER; note = 2'-O- methyl
  modified_base 16: mod_base = OTHER; note = 2'- fluoro
  modified_base 17: mod_base = gm
  modified_base 18: mod_base = OTHER; note = 2'-O- methyl
  modified_base 19: mod_base = OTHER; note = 2'-O- methyl
  modified_base 20: mod_base = cm
  modified_base 22: mod_base = cm
attgcttttattccaagaactc

SEQ ID NO: 518 - RNA, 22 nt, synthetic construct
  source 1..22: mol_type = other RNA
  modified_base 1: mod_base = OTHER; note = 2'-O- methyl
  modified_base 2: mod_base = OTHER; note = 2'- fluoro
  modified_base 3: mod_base = um
  modified_base 4: mod_base = gm
  modified_base 5: mod_base = cm
  modified_base 6: mod_base = OTHER; note = 2'- fluoro
  modified_base 7: mod_base = um
  modified_base 8: mod_base = OTHER; note = 2'- fluoro
  modified_base 9: mod_base = OTHER; note = 2'- fluoro
  modified_base 10: mod_base = OTHER; note = 2'-O- methyl
  modified_base 11: mod_base = um
  modified_base 12: mod_base = um
  modified_base 13: mod_base = cm
  modified_base 14: mod_base = OTHER; note = 2'- fluoro
  modified_base 15: mod_base = OTHER; note = 2'-O- methyl
  modified_base 16: mod_base = OTHER; note = 2'- fluoro
  modified_base 17: mod_base = gm
  modified_base 18: mod_base = OTHER; note = 2'-O- methyl
  modified_base 19: mod_base = OTHER; note = 2'-O- methyl
  modified_base 20: mod_base = cm
  modified_base 22: mod_base = cm
attgcttttattccaagaactc

SEQ ID NO: 519 - RNA, 20 nt, synthetic construct
  source 1..20: mol_type = other RNA
  modified_base 1: mod_base = gm
  modified_base 2: mod_base = um
  modified_base 3: mod_base = um
  modified_base 4: mod_base = cm
  modified_base 5: mod_base = um
  modified_base 6: mod_base = um
  modified_base 7: mod_base = gm
  modified_base 8: mod_base = OTHER; note = 2'- fluoro
  modified_base 9: mod_base = OTHER; note = 2'- fluoro
  modified_base 10: mod_base = OTHER; note = 2'- fluoro
  modified_base 11: mod_base = um
  modified_base 12: mod_base = OTHER; note = 2'-O- methyl
  modified_base 13: mod_base = OTHER; note = 2'-O- methyl
  modified_base 14: mod_base = OTHER; note = 2'-O- methyl
  modified_base 15: mod_base = OTHER; note = 2'-O- methyl
  modified_base 16: mod_base = gm
  modified_base 17: mod_base = cm
  modified_base 18: mod_base = OTHER; note = 2'-O- methyl
  modified_base 19: mod_base = OTHER; note = 2'-O- methyl
  modified_base 20: mod_base = um
  misc_binding 20: bound_moiety = L96
gttcttggaataaaagcaat

SEQ ID NO: 520 - RNA, 22 nt, synthetic construct
  source 1..22: mol_type = other RNA
  modified_base 1: mod_base = OTHER; note = 2'-O- methyl
  modified_base 2: mod_base = OTHER; note = 2'- fluoro
  modified_base 3: mod_base = um
  modified_base 4: mod_base = gm
  modified_base 5: mod_base = cm
  modified_base 6: mod_base = OTHER; note = 2'- fluoro
  modified_base 7: mod_base = um
  modified_base 8: mod_base = um
  modified_base 9: mod_base = um
  modified_base 10: mod_base = OTHER; note = 2'-O- methyl
  modified_base 11: mod_base = um
  modified_base 12: mod_base = um
  modified_base 13: mod_base = cm
  modified_base 14: mod_base = OTHER; note = 2'- fluoro
  modified_base 15: mod_base = OTHER; note = 2'-O- methyl
  modified_base 16: mod_base = OTHER; note = 2'- fluoro
  modified_base 17: mod_base = gm
  modified_base 18: mod_base = OTHER; note = 2'-O- methyl
  modified_base 19: mod_base = OTHER; note = 2'-O- methyl
  modified_base 20: mod_base = cm
  modified_base 22: mod_base = cm
  modified_base 21: mod_base = OTHER; note = 2'-O-methyl Inosine
attgcttttattccaagaacnc

SEQ ID NO: 521 - RNA, 22 nt, synthetic construct
  source 1..22: mol_type = other RNA
  modified_base 1: mod_base = OTHER; note = 2'-O- methyl
  modified_base 2: mod_base = OTHER; note = 2'- fluoro
  modified_base 3: mod_base = um
  modified_base 4: mod_base = gm
  modified_base 5: mod_base = cm
  modified_base 6: mod_base = OTHER; note = 2'- fluoro
  modified_base 7: mod_base = um
  modified_base 8: mod_base = OTHER; note = 2'- fluoro
  modified_base 9: mod_base = OTHER; note = 2'- fluoro
  modified_base 10: mod_base = OTHER; note = 2'-O- methyl
  modified_base 11: mod_base = um
  modified_base 12: mod_base = um
  modified_base 13: mod_base = cm
  modified_base 14: mod_base = OTHER; note = 2'- fluoro
  modified_base 15: mod_base = OTHER; note = 2'-O- methyl
  modified_base 16: mod_base = OTHER; note = 2'- fluoro
  modified_base 17: mod_base = gm
  modified_base 18: mod_base = OTHER; note = 2'-O- methyl
  modified_base 19: mod_base = OTHER; note = 2'-O- methyl
  modified_base 20: mod_base = cm
  modified_base 22: mod_base = cm
  modified_base 21: mod_base = OTHER; note = 2'-O-methyl Inosine
attgcttttattccaagaacnc

SEQ ID NO: 522 - RNA, 22 nt, synthetic construct
  source 1..22: mol_type = other RNA
  modified_base 1: mod_base = OTHER; note = 2'-O- methyl
  modified_base 2: mod_base = OTHER; note = 2'- fluoro
  modified_base 3: mod_base = um
  modified_base 4: mod_base = gm
  modified_base 5: mod_base = cm
  modified_base 6: mod_base = um
  modified_base 7: mod_base = um
  modified_base 8: mod_base = OTHER; note = 2'- fluoro
  modified_base 9: mod_base = OTHER; note = 2'- fluoro
  modified_base 10: mod_base = OTHER; note = 2'-O- methyl
  modified_base 11: mod_base = um
  modified_base 12: mod_base = um
  modified_base 13: mod_base = cm
  modified_base 14: mod_base = OTHER; note = 2'- fluoro
  modified_base 15: mod_base = OTHER; note = 2'-O- methyl
  modified_base 16: mod_base = OTHER; note = 2'- fluoro
  modified_base 17: mod_base = gm
  modified_base 18: mod_base = OTHER; note = 2'-O- methyl
  modified_base 19: mod_base = OTHER; note = 2'-O- methyl
  modified_base 20: mod_base = cm
  modified_base 21: mod_base = um
  modified_base 22: mod_base = cm
attgcttttattccaagaactc

SEQ ID NO: 523 - RNA, 19 nt, synthetic construct
  source 1..19: mol_type = other RNA
  modified_base 1: mod_base = um
  modified_base 2: mod_base = um
  modified_base 3: mod_base = cm
  modified_base 4: mod_base = um
  modified_base 5: mod_base = um
  modified_base 6: mod_base = gm
  modified_base 7: mod_base = OTHER; note = 2'- fluoro
  modified_base 8: mod_base = OTHER; note = 2'- fluoro
  modified_base 9: mod_base = OTHER; note = 2'- fluoro
  modified_base 10: mod_base = um
  modified_base 11: mod_base = OTHER; note = 2'-O- methyl
  modified_base 12: mod_base = OTHER; note = 2'-O- methyl
  modified_base 13: mod_base = OTHER; note = 2'-O- methyl
  modified_base 14: mod_base = OTHER; note = 2'-O- methyl
  modified_base 15: mod_base = gm
  modified_base 16: mod_base = cm
  modified_base 17: mod_base = OTHER; note = 2'-O- methyl
  modified_base 18: mod_base = OTHER; note = 2'-O- methyl
  modified_base 19: mod_base = um
  misc_binding 19: bound_moiety = L96
ttcttggaataaaagcaat

SEQ ID NO: 524 - RNA, 21 nt, synthetic construct
  source 1..21: mol_type = other RNA
  modified_base 1: mod_base = OTHER; note = 2'-O- methyl
  modified_base 2: mod_base = OTHER; note = 2'- fluoro
  modified_base 3: mod_base = um
  modified_base 4: mod_base = gm
  modified_base 5: mod_base = cm
  modified_base 6: mod_base = OTHER; note = 2'- fluoro
  modified_base 7: mod_base = um
  modified_base 8: mod_base = um
  modified_base 9: mod_base = um
  modified_base 10: mod_base = OTHER; note = 2'-O- methyl
  modified_base 11: mod_base = um
  modified_base 12: mod_base = um
  modified_base 13: mod_base = gm
  modified_base 14: mod_base = OTHER; note = 2'- fluoro
  modified_base 15: mod_base = OTHER; note = 2'-O- methyl
  modified_base 16: mod_base = OTHER; note = 2'- fluoro
  modified_base 17: mod_base = gm
  modified_base 18: mod_base = OTHER; note = 2'-O- methyl
  modified_base 19: mod_base = OTHER; note = 2'-O- methyl
  modified_base 20: mod_base = cm
  modified_base 21: mod_base = um
attgcttttattgcaagaact

SEQ ID NO: 525 - RNA, 23 nt, synthetic construct
  source 1..23: mol_type = other RNA
  modified_base 1: mod_base = OTHER; note = 2'-O- methyl
  modified_base 2: mod_base = OTHER; note = 2'- fluoro
  modified_base 3: mod_base = um
  modified_base 4: mod_base = gm
  modified_base 5: mod_base = cm
  modified_base 6: mod_base = OTHER; note = 2'- fluoro
  modified_base 7: mod_base = um
  modified_base 8: mod_base = um
  modified_base 9: mod_base = um
  modified_base 10: mod_base = OTHER; note = 2'-O- methyl
  modified_base 11: mod_base = um
  modified_base 12: mod_base = um
  modified_base 13: mod_base = cm
  modified_base 14: mod_base = OTHER; note = 2'- fluoro
  modified_base 15: mod_base = OTHER; note = 2'-O- methyl
  modified_base 16: mod_base = OTHER; note = 2'- fluoro
  modified_base 17: mod_base = gm
  modified_base 18: mod_base = OTHER; note = 2'-O- methyl
  modified_base 19: mod_base = OTHER; note = 2'-O- methyl
  modified_base 20: mod_base = cm
  modified_base 21: mod_base = um
  modified_base 22: mod_base = cm
  modified_base 23: mod_base = um
  modified_base 1: mod_base = OTHER; note = Ethylene Vinyl Phosphate Modification
attgcttttattccaagaactct

SEQ ID NO: 526 - RNA, 23 nt, synthetic construct
  source 1..23: mol_type = other RNA
  modified_base 1: mod_base = OTHER; note = 2'-O- methyl
  modified_base 2: mod_base = OTHER; note = 2'- fluoro
  modified_base 3: mod_base = um
  modified_base 4: mod_base = gm
  modified_base 5: mod_base = cm
  modified_base 6: mod_base = OTHER; note = 2'- fluoro
  modified_base 7: mod_base = um
  modified_base 8: mod_base = OTHER; note = 2'- fluoro
  modified_base 9: mod_base = OTHER; note = 2'- fluoro
  modified_base 10: mod_base = OTHER; note = 2'-O- methyl
  modified_base 11: mod_base = um
  modified_base 12: mod_base = um
  modified_base 13: mod_base = cm
  modified_base 14: mod_base = OTHER; note = 2'- fluoro
  modified_base 15: mod_base = OTHER; note = 2'-O- methyl
  modified_base 16: mod_base = OTHER; note = 2'- fluoro
  modified_base 17: mod_base = gm
  modified_base 18: mod_base = OTHER; note = 2'-O- methyl
  modified_base 19: mod_base = OTHER; note = 2'-O- methyl
  modified_base 20: mod_base = cm
  modified_base 21: mod_base = um
  modified_base 22: mod_base = cm
  modified_base 23: mod_base = um
  modified_base 1: mod_base = OTHER; note = Ethylene Vinyl Phosphate Modification
attgcttttattccaagaactct

SEQ ID NO: 527 - RNA, 21 nt, synthetic construct
  source 1..21: mol_type = other RNA
  modified_base 1: mod_base = OTHER; note = 2'-O- methyl
  modified_base 2: mod_base = OTHER; note = 2'-O- methyl
  modified_base 3: mod_base = um
  modified_base 4: mod_base = OTHER; note = 2'-O- methyl
  modified_base 5: mod_base = OTHER; note = 2'-O- methyl
  modified_base 6: mod_base = OTHER; note = 2'-O- methyl
  modified_base 7: mod_base = OTHER; note = 2'-O- methyl
  modified_base 8: mod_base = gm
  modified_base 9: mod_base = OTHER; note = 2'- fluoro
  modified_base 10: mod_base = OTHER; note = 2'- fluoro
  modified_base 11: mod_base = OTHER; note = 2'- fluoro
  modified_base 12: mod_base = cm
  modified_base 13: mod_base = cm
  modified_base 14: mod_base = um
  modified_base 15: mod_base = cm
  modified_base 16: mod_base = OTHER; note = 2'-O- methyl
  modified_base 17: mod_base = gm
  modified_base 18: mod_base = OTHER; note = 2'-O- methyl
  modified_base 19: mod_base = OTHER; note = 2'-O- methyl
  modified_base 20: mod_base = cm
  modified_base 21: mod_base = OTHER; note = 2'-O- methyl
  misc_binding 21: bound_moiety = L96
aataaaagcaacctcagaaca

SEQ ID NO: 528 - RNA, 23 nt, synthetic construct
  source 1..23: mol_type = other RNA
  modified_base 1: mod_base = um
  modified_base 2: mod_base = OTHER; note = 2'- fluoro
  modified_base 3: mod_base = um
  modified_base 4: mod_base = um
  modified_base 5: mod_base = cm
  modified_base 6: mod_base = OTHER; note = 2'- fluoro
  modified_base 7: mod_base = gm
  modified_base 8: mod_base = gm
  modified_base 9: mod_base = gm
  modified_base 10: mod_base = gm
  modified_base 11: mod_base = um
  modified_base 12: mod_base = um
  modified_base 13: mod_base = gm
  modified_base 14: mod_base = OTHER; note = 2'- fluoro
  modified_base 15: mod_base = um
  modified_base 16: mod_base = OTHER; note = 2'- fluoro
  modified_base 17: mod_base = um
  modified_base 18: mod_base = um
  modified_base 19: mod_base = OTHER; note = 2'-O- methyl
  modified_base 20: mod_base = um
  modified_base 21: mod_base = um
  modified_base 22: mod_base = cm
  modified_base 23: mod_base = cm
tgttctggggttgcttttattcc

SEQ ID NO: 529 - RNA, 23 nt, synthetic construct
  source 1..23: mol_type = other RNA
  modified_base 1: mod_base = OTHER; note = 2'-O- methyl
  modified_base 2: mod_base = OTHER; note = 2'- fluoro
  modified_base 3: mod_base = um
  modified_base 4: mod_base = gm
  modified_base 5: mod_base = cm
  modified_base 6: mod_base = OTHER; note = 2'- fluoro
  modified_base 7: mod_base = um
  modified_base 8: mod_base = OTHER; note = 2'- fluoro
  modified_base 9: mod_base = OTHER; note = 2'- fluoro
  modified_base 10: mod_base = OTHER; note = 2'- fluoro
  modified_base 11: mod_base = um
  modified_base 12: mod_base = um
  modified_base 13: mod_base = cm
  modified_base 14: mod_base = OTHER; note = 2'- fluoro
  modified_base 15: mod_base = OTHER; note = 2'-O- methyl
  modified_base 16: mod_base = OTHER; note = 2'- fluoro
  modified_base 17: mod_base = gm
  modified_base 18: mod_base = OTHER; note = 2'-O- methyl
  modified_base 19: mod_base = OTHER; note = 2'-O- methyl
  modified_base 20: mod_base = cm
  modified_base 21: mod_base = um
  modified_base 22: mod_base = cm
  modified_base 23: mod_base = um
  modified_base 1: mod_base = OTHER; note = Ethylene Vinyl Phosphate Modification
attgcttttattccaagaactct

SEQ ID NO: 530 - RNA, 21 nt, synthetic construct
  source 1..21: mol_type = other RNA
  modified_base 1: mod_base = OTHER; note = 2'-O- methyl
  modified_base 2: mod_base = gm
  modified_base 3: mod_base = um
  modified_base 4: mod_base = um
  modified_base 5: mod_base = cm
  modified_base 6: mod_base = um
  modified_base 7: mod_base = OTHER; note = 2'- fluoro
  modified_base 8: mod_base = gm
  modified_base 9: mod_base = OTHER; note = 2'- fluoro
  modified_base 10: mod_base = OTHER; note = 2'- fluoro
  modified_base 11: mod_base = OTHER; note = 2'- fluoro
  modified_base 12: mod_base = um
  modified_base 13: mod_base = OTHER; note = 2'-O- methyl
  modified_base 14: mod_base = OTHER; note = 2'-O- methyl
  modified_base 15: mod_base = OTHER; note = 2'- fluoro
  modified_base 16: mod_base = OTHER; note = 2'-O- methyl
  modified_base 17: mod_base = gm
  modified_base 18: mod_base = cm
  modified_base 19: mod_base = OTHER; note = 2'-O- methyl
  modified_base 20: mod_base = OTHER; note = 2'-O- methyl
  modified_base 21: mod_base = um
  misc_binding 21: bound_moiety = L96
agttcttggaataaaagcaat

SEQ ID NO: 531 - RNA, 23 nt, synthetic construct
  source 1..23: mol_type = other RNA
  modified_base 1: mod_base = OTHER; note = 2'-O- methyl
  modified_base 2: mod_base = OTHER; note = 2'- fluoro
  modified_base 3: mod_base = um
  modified_base 4: mod_base = gm
  modified_base 5: mod_base = cm
  modified_base 6: mod_base = OTHER; note = 2'- fluoro
  modified_base 7: mod_base = um
  modified_base 8: mod_base = OTHER; note = 2'- fluoro
  modified_base 9: mod_base = OTHER; note = 2'- fluoro
  modified_base 10: mod_base = OTHER; note = 2'- fluoro
  modified_base 11: mod_base = um
  modified_base 12: mod_base = um
  modified_base 13: mod_base = cm
  modified_base 14: mod_base = OTHER; note = 2'- fluoro
  modified_base 15: mod_base = OTHER; note = 2'-O- methyl
  modified_base 16: mod_base = OTHER; note = 2'- fluoro
  modified_base 17: mod_base = gm
  modified_base 18: mod_base = OTHER; note = 2'-O- methyl
  modified_base 19: mod_base = OTHER; note = 2'-O- methyl
  modified_base 20: mod_base = cm
  modified_base 21: mod_base = um
  modified_base 22: mod_base = cm
  modified_base 23: mod_base = um
attgcttttattccaagaactct

SEQ ID NO: 532 - RNA, 21 nt, synthetic construct
  source 1..21: mol_type = other RNA
  modified_base 1: mod_base = OTHER; note = 2'-O- methyl
  modified_base 2: mod_base = gm
  modified_base 3: mod_base = um
  modified_base 4: mod_base = um
  modified_base 5: mod_base = cm
  modified_base 6: mod_base = um
  modified_base 7: mod_base = OTHER; note = 2'- fluoro
  modified_base 8: mod_base = gm
  modified_base 9: mod_base = OTHER; note = 2'- fluoro
  modified_base 10: mod_base = OTHER; note = 2'-O- methyl
  modified_base 11: mod_base = OTHER; note = 2'- fluoro
  modified_base 12: mod_base = um
  modified_base 13: mod_base = OTHER; note = 2'- fluoro
  modified_base 14: mod_base = OTHER; note = 2'-O- methyl
  modified_base 15: mod_base = OTHER; note = 2'- fluoro
  modified_base 16: mod_base = OTHER; note = 2'-O- methyl
  modified_base 17: mod_base = gm
  modified_base 18: mod_base = cm
  modified_base 19: mod_base = OTHER; note = 2'-O- methyl
  modified_base 20: mod_base = OTHER; note = 2'-O- methyl
  modified_base 21: mod_base = um
  misc_binding 21: bound_moiety = L96
agttcttggaataaaagcaat

SEQ ID NO: 533 - RNA, 23 nt, synthetic construct
  source 1..23: mol_type = other RNA
  modified_base 1: mod_base = OTHER; note = 2'-O- methyl
  modified_base 2: mod_base = OTHER; note = 2'- fluoro
  modified_base 3: mod_base = OTHER; note = 2'- fluoro
  modified_base 4: mod_base = OTHER; note = 2'- fluoro
  modified_base 5: mod_base = cm
  modified_base 6: mod_base = OTHER; note = 2'- fluoro
  modified_base 7: mod_base = um
  modified_base 8: mod_base = OTHER; note = 2'- fluoro
  modified_base 9: mod_base = um
  modified_base 10: mod_base = OTHER; note = 2'- fluoro
  modified_base 11: mod_base = um
  modified_base 12: mod_base = OTHER; note = 2'- fluoro
  modified_base 13: mod_base = cm
  modified_base 14: mod_base = OTHER; note = 2'- fluoro
  modified_base 15: mod_base = OTHER; note = 2'-O- methyl
  modified_base 16: mod_base = OTHER; note = 2'- fluoro
  modified_base 17: mod_base = gm
  modified_base 18: mod_base = OTHER; note = 2'- fluoro
  modified_base 19: mod_base = OTHER; note = 2'-O- methyl
  modified_base 20: mod_base = OTHER; note = 2'- fluoro
  modified_base 21: mod_base = um
  modified_base 22: mod_base = cm
  modified_base 23: mod_base = um
attgcttttattccaagaactct

SEQ ID NO: 534 - RNA, 23 nt, synthetic construct
  source 1..23: mol_type = other RNA
  modified_base 1: mod_base = OTHER; note = 2'-O- methyl
  modified_base 2: mod_base = OTHER; note = 2'- fluoro
  modified_base 3: mod_base = um
  modified_base 4: mod_base = gm
  modified_base 5: mod_base = cm
  modified_base 6: mod_base = OTHER; note = 2'- fluoro
  modified_base 7: mod_base = um
  modified_base 8: mod_base = um
  modified_base 9: mod_base = um
  modified_base 10: mod_base = OTHER; note = 2'-O- methyl
  modified_base 11: mod_base = um
  modified_base 12: mod_base = um
  modified_base 13: mod_base = cm
  modified_base 14: mod_base = OTHER; note = 2'- fluoro
  modified_base 15: mod_base = OTHER; note = 2'-O- methyl
  modified_base 16: mod_base = OTHER; note = 2'- fluoro
  modified_base 17: mod_base = gm
  modified_base 18: mod_base = OTHER; note = 2'-O- methyl
  modified_base 19: mod_base = OTHER; note = 2'-O- methyl
  modified_base 20: mod_base = cm
  modified_base 22: mod_base = cm
  modified_base 23: mod_base = um
  modified_base 21: mod_base = OTHER; note = Threose nucleic acid
attgcttttattccaagaactct

SEQ ID NO: 535 - RNA, 23 nt, synthetic construct
  source 1..23: mol_type = other RNA
  modified_base 1: mod_base = OTHER; note = 2'-O- methyl
  modified_base 2: mod_base = OTHER; note = 2'- fluoro
  modified_base 3: mod_base = um
  modified_base 4: mod_base = gm
  modified_base 5: mod_base = cm
  modified_base 6: mod_base = OTHER; note = 2'- fluoro
  modified_base 7: mod_base = um
  modified_base 8: mod_base = um
  modified_base 9: mod_base = um
  modified_base 10: mod_base = OTHER; note = 2'-O- methyl
  modified_base 11: mod_base = um
  modified_base 12: mod_base = um
  modified_base 13: mod_base = cm
  modified_base 14: mod_base = OTHER; note = 2'- fluoro
  modified_base 15: mod_base = OTHER; note = 2'-O- methyl
  modified_base 16: mod_base = OTHER; note = 2'- fluoro
  modified_base 17: mod_base = gm
  modified_base 18: mod_base = OTHER; note = 2'-O- methyl
  modified_base 19: mod_base = OTHER; note = 2'-O- methyl
  modified_base 20: mod_base = cm
  modified_base 23: mod_base = um
  modified_base 21..22: mod_base = OTHER; note = Threose nucleic acid
attgcttttattccaagaactct

SEQ ID NO: 536 - RNA, 23 nt, synthetic construct
  source 1..23: mol_type = other RNA
  modified_base 1: mod_base = OTHER; note = 2'-O- methyl
  modified_base 2: mod_base = OTHER; note = 2'- fluoro
  modified_base 3: mod_base = um
  modified_base 4: mod_base = gm
  modified_base 5: mod_base = cm
  modified_base 6: mod_base = OTHER; note = 2'- fluoro
  modified_base 7: mod_base = um
  modified_base 8: mod_base = um
  modified_base 9: mod_base = um
  modified_base 10: mod_base = OTHER; note = 2'-O- methyl
  modified_base 11: mod_base = um
  modified_base 12: mod_base = um
  modified_base 13: mod_base = cm
  modified_base 14: mod_base = OTHER; note = 2'- fluoro
  modified_base 15: mod_base = OTHER; note = 2'-O- methyl
  modified_base 16: mod_base = OTHER; note = 2'- fluoro
  modified_base 17: mod_base = gm
  modified_base 18: mod_base = OTHER; note = 2'-O- methyl
  modified_base 19: mod_base = OTHER; note = 2'-O- methyl
  modified_base 20: mod_base = cm
  modified_base 22: mod_base = cm
  modified_base 21: mod_base = OTHER; note = Threose nucleic acid
  modified_base 23: mod_base = OTHER; note = Threose nucleic acid
attgcttttattccaagaactct

SEQ ID NO: 537 - RNA, 23 nt, synthetic construct
  source 1..23: mol_type = other RNA
  modified_base 1: mod_base = OTHER; note = 2'-O- methyl
  modified_base 2: mod_base = OTHER; note = 2'- fluoro
  modified_base 3: mod_base = um
  modified_base 4: mod_base = gm
  modified_base 5: mod_base = cm
  modified_base 6: mod_base = OTHER; note = 2'- fluoro
  modified_base 7: mod_base = um
  modified_base 8: mod_base = um
  modified_base 9: mod_base = um
  modified_base 10: mod_base = OTHER; note = 2'-O- methyl
  modified_base 11: mod_base = um
  modified_base 12: mod_base = um
  modified_base 13: mod_base = cm
  modified_base 14: mod_base = OTHER; note = 2'- fluoro
  modified_base 15: mod_base = OTHER; note = 2'-O- methyl
  modified_base 16: mod_base = OTHER; note = 2'- fluoro
  modified_base 17: mod_base = gm
  modified_base 18: mod_base = OTHER; note = 2'-O- methyl
  modified_base 19: mod_base = OTHER; note = 2'-O- methyl
  modified_base 20: mod_base = cm
  modified_base 21..23: mod_base = OTHER; note = Threose nucleic acid
attgcttttattccaagaactct

SEQ ID NO: 538 - RNA, 19 nt, synthetic construct
  source 1..19: mol_type = other RNA
  modified_base 1: mod_base = cm
  modified_base 2: mod_base = OTHER; note = 2'-O- methyl
  modified_base 3: mod_base = OTHER; note = 2'-O- methyl
  modified_base 4: mod_base = OTHER; note = 2'-O- methyl
  modified_base 5: mod_base = OTHER; note = 2'- fluoro
  modified_base 6: mod_base = gm
  modified_base 7: mod_base = OTHER; note = 2'- fluoro
  modified_base 8: mod_base = OTHER; note = 2'- fluoro
  modified_base 9: mod_base = OTHER; note = 2'- fluoro
  modified_base 10: mod_base = cm
  modified_base 11: mod_base = cm
  modified_base 12: mod_base = um
  modified_base 13: mod_base = cm
  modified_base 14: mod_base = OTHER; note = 2'-O- methyl
  modified_base 15: mod_base = gm
  modified_base 16: mod_base = OTHER; note = 2'-O- methyl
  modified_base 17: mod_base = OTHER; note = 2'-O- methyl
  modified_base 18: mod_base = cm
  modified_base 19: mod_base = um
  misc_binding 19: bound_moiety = L96
caaaagcaacctcagaact

SEQ ID NO: 539 - RNA, 21 nt, synthetic construct
  source 1..21: mol_type = other RNA
  modified_base 1: mod_base = OTHER; note = 2'-O- methyl
  modified_base 2: mod_base = OTHER; note = 2'- fluoro
  modified_base 3: mod_base = um
  modified_base 4: mod_base = um
  modified_base 5: mod_base = cm
  modified_base 6: mod_base = OTHER; note = 2'- fluoro
  modified_base 7: mod_base = gm
  modified_base 8: mod_base = OTHER; note = 2'- fluoro
  modified_base 9: mod_base = OTHER; note = 2'- fluoro
  modified_base 10: mod_base = gm
  modified_base 11: mod_base = um
  modified_base 12: mod_base = um
  modified_base 13: mod_base = gm
  modified_base 14: mod_base = OTHER; note = 2'- fluoro
  modified_base 15: mod_base = um
  modified_base 16: mod_base = OTHER; note = 2'- fluoro
  modified_base 17: mod_base = um
  modified_base 18: mod_base = um
  modified_base 19: mod_base = gm
  modified_base 20: mod_base = um
  modified_base 21: mod_base = um
agttctgaggttgcttttgtt

SEQ ID NO: 540 - RNA, 21 nt, synthetic construct
  source 1..21: mol_type = other RNA
  modified_base 1: mod_base = OTHER; note = 2'-O- methyl
  modified_base 2: mod_base = OTHER; note = 2'- fluoro
  modified_base 3: mod_base = um
  modified_base 4: mod_base = um
  modified_base 5: mod_base = cm
  modified_base 6: mod_base = OTHER; note = 2'- fluoro
  modified_base 7: mod_base = gm
  modified_base 8: mod_base = OTHER; note = 2'-O- methyl
  modified_base 9: mod_base = gm
  modified_base 10: mod_base = gm
  modified_base 11: mod_base = um
  modified_base 12: mod_base = um
  modified_base 13: mod_base = gm
  modified_base 14: mod_base = OTHER; note = 2'- fluoro
  modified_base 15: mod_base = um
  modified_base 16: mod_base = OTHER; note = 2'- fluoro
  modified_base 17: mod_base = um
  modified_base 18: mod_base = um
  modified_base 19: mod_base = gm
  modified_base 20: mod_base = um
  modified_base 21: mod_base = um
agttctgaggttgcttttgtt

SEQ ID NO: 541 - RNA, 19 nt, synthetic construct
  source 1..19: mol_type = other RNA
  modified_base 1: mod_base = cm
  modified_base 2: mod_base = OTHER; note = 2'-O- methyl
  modified_base 3: mod_base = OTHER; note = 2'-O- methyl
  modified_base 4: mod_base = OTHER; note = 2'-O- methyl
  modified_base 5: mod_base = OTHER; note = 2'-O- methyl
  modified_base 6: mod_base = gm
  modified_base 7: mod_base = OTHER; note = 2'- fluoro
  modified_base 8: mod_base = OTHER; note = 2'- fluoro
  modified_base 9: mod_base = OTHER; note = 2'- fluoro
  modified_base 10: mod_base = um
  modified_base 11: mod_base = cm
  modified_base 12: mod_base = um
  modified_base 13: mod_base = cm
  modified_base 14: mod_base = OTHER; note = 2'-O- methyl
  modified_base 15: mod_base = gm
  modified_base 16: mod_base = OTHER; note = 2'-O- methyl
  modified_base 17: mod_base = OTHER; note = 2'-O- methyl
  modified_base 18: mod_base = cm
  modified_base 19: mod_base = um
  misc_binding 19: bound_moiety = L96
caaaagcaatctcagaact

SEQ ID NO: 542 - RNA, 21 nt, synthetic construct
  source 1..21: mol_type = other RNA
  modified_base 1: mod_base = um
  modified_base 2: mod_base = OTHER; note = 2'- deoxyribose
  modified_base 3: mod_base = um
  modified_base 4: mod_base = um
  modified_base 5: mod_base = OTHER; note = 2'- deoxyribose
  modified_base 6: mod_base = um
  modified_base 7: mod_base = OTHER; note = 2'- deoxyribose
  modified_base 8: mod_base = OTHER; note = 2'-O- methyl
  modified_base 9: mod_base = gm
  modified_base 10: mod_base = gm
  modified_base 11: mod_base = um
  modified_base 13: mod_base = gm
  modified_base 14: mod_base = OTHER; note = 2'- fluoro
  modified_base 15: mod_base = um
  modified_base 16: mod_base = um
  modified_base 17: mod_base = um
  modified_base 18: mod_base = um
  modified_base 19: mod_base = gm
  modified_base 20: mod_base = um
  modified_base 21: mod_base = um
  modified_base 12: mod_base = OTHER; note = Threose nucleic acid
tgttctgaggttgcttttgtt

SEQ ID NO: 543 - RNA, 19 nt, synthetic construct
  source 1..19: mol_type = other RNA
  modified_base 1: mod_base = cm
  modified_base 2: mod_base = OTHER; note = 2'-O- methyl
  modified_base 3: mod_base = OTHER; note = 2'-O- methyl
  modified_base 4: mod_base = OTHER; note = 2'-O- methyl
  modified_base 5: mod_base = OTHER; note = 2'-O- methyl
  modified_base 6: mod_base = gm
  modified_base 7: mod_base = OTHER; note = 2'- fluoro
  modified_base 8: mod_base = OTHER; note = 2'- fluoro
  modified_base 9: mod_base = OTHER; note = 2'- fluoro
  modified_base 10: mod_base = cm
  modified_base 11: mod_base = cm
  modified_base 12: mod_base = um
  modified_base 13: mod_base = cm
  modified_base 14: mod_base = OTHER; note = 2'-O- methyl
  modified_base 15: mod_base = gm
  modified_base 16: mod_base = OTHER; note = 2'-O- methyl
  modified_base 17: mod_base = OTHER; note = 2'-O- methyl
  modified_base 18: mod_base = cm
  modified_base 19: mod_base = um
  misc_binding 19: bound_moiety = L96
caaaagcaacctcagaact

SEQ ID NO: 544 - RNA, 21 nt, synthetic construct
  source 1..21: mol_type = other RNA
  modified_base 1: mod_base = OTHER; note = 2'-O- methyl
  modified_base 2: mod_base = OTHER; note = 2'- deoxyribose
  modified_base 3: mod_base = um
  modified_base 4: mod_base = um
  modified_base 5: mod_base = OTHER; note = 2'- deoxyribose
  modified_base 6: mod_base = um
  modified_base 7: mod_base = OTHER; note = 2'- deoxyribose
  modified_base 8: mod_base = OTHER; note = 2'-O- methyl
  modified_base 9: mod_base = gm
  modified_base 10: mod_base = gm
  modified_base 11: mod_base = um
  modified_base 13: mod_base = gm
  modified_base 14: mod_base = OTHER; note = 2'- fluoro
  modified_base 15: mod_base = um
  modified_base 16: mod_base = um
  modified_base 17: mod_base = um
  modified_base 18: mod_base = um
  modified_base 19: mod_base = gm
  modified_base 20: mod_base = um
  modified_base 21: mod_base = um
  modified_base 12: mod_base = OTHER; note = Threose nucleic acid
agttctgaggttgcttttgtt

SEQ ID NO: 545 - RNA, 19 nt, synthetic construct
  source 1..19: mol_type = other RNA
  modified_base 1: mod_base = cm
  modified_base 2: mod_base = OTHER; note = 2'-O- methyl
  modified_base 3: mod_base = OTHER; note = 2'-O- methyl
  modified_base 4: mod_base = OTHER; note = 2'-O- methyl
  modified_base 5: mod_base = OTHER; note = 2'-O- methyl
  modified_base 6: mod_base = gm
  modified_base 7: mod_base = OTHER; note = 2'- fluoro
  modified_base 8: mod_base = OTHER; note = 2'- fluoro
  modified_base 9: mod_base = OTHER; note = 2'- fluoro
  modified_base 10: mod_base = um
  modified_base 11: mod_base = cm
  modified_base 12: mod_base = um
  modified_base 13: mod_base = cm
  modified_base 14: mod_base = OTHER; note = 2'-O- methyl
  modified_base 15: mod_base = gm
  modified_base 16: mod_base = OTHER; note = 2'-O- methyl
  modified_base 17: mod_base = OTHER; note = 2'-O- methyl
  modified_base 18: mod_base = cm
  modified_base 19: mod_base = um
  misc_binding 19: bound_moiety = L96
caaaagcaatctcagaact

SEQ ID NO: 546 - RNA, 21 nt, synthetic construct
  source 1..21: mol_type = other RNA
  modified_base 1: mod_base = gm
  modified_base 2: mod_base = OTHER; note = 2'-O- methyl
  modified_base 3: mod_base = OTHER; note = 2'-O- methyl
  modified_base 4: mod_base = cm
  modified_base 5: mod_base = OTHER; note = 2'-O- methyl
  modified_base 6: mod_base = OTHER; note = 2'-O- methyl
  modified_base 7: mod_base = OTHER; note = 2'- fluoro
  modified_base 8: mod_base = OTHER; note = 2'-O- methyl
  modified_base 9: mod_base = OTHER; note = 2'- fluoro
  modified_base 10: mod_base = OTHER; note = 2'- fluoro
  modified_base 11: mod_base = OTHER; note = 2'- fluoro
  modified_base 12: mod_base = OTHER; note = 2'-O- methyl
  modified_base 13: mod_base = cm
  modified_base 14: mod_base = cm
  modified_base 15: mod_base = um
  modified_base 16: mod_base = cm
  modified_base 17: mod_base = OTHER; note = 2'-O- methyl
  modified_base 18: mod_base = gm
  modified_base 19: mod_base = OTHER; note = 2'-O- methyl
  modified_base 20: mod_base = OTHER; note = 2'-O- methyl
  modified_base 21: mod_base = um
  misc_binding 21: bound_moiety = L96
gaacaaaagcaacctcagaat

SEQ ID NO: 547 - RNA, 23 nt, synthetic construct
  source 1..23: mol_type = other RNA
  modified_base 1: mod_base = OTHER; note = 2'-O- methyl
  modified_base 2: mod_base = OTHER; note = 2'- fluoro
  modified_base 3: mod_base = um
  modified_base 4: mod_base = cm
  modified_base 5: mod_base = um
  modified_base 6: mod_base = OTHER; note = 2'- fluoro
  modified_base 7: mod_base = OTHER; note = 2'-O- methyl
  modified_base 8: mod_base = OTHER; note = 2'- fluoro
  modified_base 9: mod_base = OTHER; note = 2'- fluoro
  modified_base 10: mod_base = um
  modified_base 11: mod_base = um
  modified_base 12: mod_base = gm
  modified_base 13: mod_base = cm
  modified_base 14: mod_base = OTHER; note = 2'- fluoro
  modified_base 15: mod_base = um
  modified_base 16: mod_base = OTHER; note = 2'- fluoro
  modified_base 17: mod_base = um
  modified_base 18: mod_base = gm
  modified_base 19: mod_base = um
  modified_base 20: mod_base = um
  modified_base 21: mod_base = cm
  modified_base 22: mod_base = um
  modified_base 23: mod_base = um
attctgaggttgcttttgttctt

SEQ ID NO: 548 - RNA, 23 nt, synthetic construct
  source 1..23: mol_type = other RNA
  modified_base 1: mod_base = OTHER; note = 2'-O- methyl
  modified_base 2: mod_base = OTHER; note = 2'- fluoro
  modified_base 3: mod_base = um
  modified_base 4: mod_base = cm
  modified_base 5: mod_base = um
  modified_base 6: mod_base = OTHER; note = 2'- fluoro
  modified_base 7: mod_base = OTHER; note = 2'-O- methyl
  modified_base 8: mod_base = gm
  modified_base 9: mod_base = gm
  modified_base 10: mod_base = um
  modified_base 11: mod_base = um
  modified_base 12: mod_base = gm
  modified_base 13: mod_base = cm
  modified_base 14: mod_base = OTHER; note = 2'- fluoro
  modified_base 15: mod_base = um
  modified_base 16: mod_base = OTHER; note = 2'- fluoro
  modified_base 17: mod_base = um
  modified_base 18: mod_base = gm
  modified_base 19: mod_base = um
  modified_base 20: mod_base = um
  modified_base 21: mod_base = cm
  modified_base 22: mod_base = um
  modified_base 23: mod_base = um
attctgaggttgcttttgttctt

SEQ ID NO: 549 - RNA, 21 nt, synthetic construct
  source 1..21: mol_type = other RNA
  modified_base 1: mod_base = gm
  modified_base 2: mod_base = OTHER; note = 2'-O- methyl
  modified_base 3: mod_base = OTHER; note = 2'-O- methyl
  modified_base 4: mod_base = cm
  modified_base 5: mod_base = gm
  modified_base 6: mod_base = OTHER; note = 2'-O- methyl
  modified_base 7: mod_base = OTHER; note = 2'-O- methyl
  modified_base 8: mod_base = OTHER; note = 2'-O- methyl
  modified_base 9: mod_base = OTHER; note = 2'- fluoro
  modified_base 10: mod_base = OTHER; note = 2'- fluoro
  modified_base 11: mod_base = OTHER; note = 2'- fluoro
  modified_base 12: mod_base = OTHER; note = 2'-O- methyl
  modified_base 13: mod_base = cm
  modified_base 14: mod_base = cm
  modified_base 15: mod_base = um
  modified_base 16: mod_base = cm
  modified_base 17: mod_base = OTHER; note = 2'-O- methyl
  modified_base 18: mod_base = gm
  modified_base 19: mod_base = OTHER; note = 2'-O- methyl
  modified_base 20: mod_base = OTHER; note = 2'-O- methyl
  modified_base 21: mod_base = um
  misc_binding 21: bound_moiety = L96
gaacgaaagtaacctcagaat

SEQ ID NO: 550 - RNA, 23 nt, synthetic construct
  source 1..23: mol_type = other RNA
  modified_base 1: mod_base = OTHER; note = 2'-O- methyl
  modified_base 2: mod_base = OTHER; note = 2'- fluoro
  modified_base 3: mod_base = um
  modified_base 4: mod_base = cm
  modified_base 5: mod_base = um
  modified_base 6: mod_base = OTHER; note = 2'- fluoro
  modified_base 7: mod_base = OTHER; note = 2'-O- methyl
  modified_base 8: mod_base = gm
  modified_base 9: mod_base = gm
  modified_base 10: mod_base = um
  modified_base 11: mod_base = um
  modified_base 12: mod_base = gm
  modified_base 13: mod_base = cm
  modified_base 14: mod_base = OTHER; note = 2'- fluoro
  modified_base 15: mod_base = um
  modified_base 16: mod_base = OTHER; note = 2'- fluoro
  modified_base 17: mod_base = cm
  modified_base 18: mod_base = gm
  modified_base 19: mod_base = um
  modified_base 20: mod_base = um
  modified_base 21: mod_base = cm
  modified_base 22: mod_base = um
  modified_base 23: mod_base = um
attctgaggttgctttcgttctt

SEQ ID NO: 551 - RNA, 23 nt, synthetic construct
  source 1..23: mol_type = other RNA
  modified_base 1: mod_base = OTHER; note = 2'-O- methyl
  modified_base 2: mod_base = OTHER; note = 2'- fluoro
  modified_base 3: mod_base = um
  modified_base 4: mod_base = gm
  modified_base 5: mod_base = OTHER; note = Glycerol nucleic acid
  modified_base 6: mod_base = OTHER; note = 2'- fluoro
  modified_base 7: mod_base = um
  modified_base 8: mod_base = um
  modified_base 9: mod_base = um
  modified_base 10: mod_base = OTHER; note = 2'- fluoro
  modified_base 11: mod_base = um
  modified_base 12: mod_base = um
  modified_base 13: mod_base = cm
  modified_base 14: mod_base = OTHER; note = 2'- fluoro
  modified_base 15: mod_base = OTHER; note = 2'-O- methyl
  modified_base 16: mod_base = OTHER; note = 2'- fluoro
  modified_base 17: mod_base = gm
  modified_base 18: mod_base = OTHER; note = 2'-O- methyl
  modified_base 19: mod_base = OTHER; note = 2'-O- methyl
  modified_base 20: mod_base = cm
  modified_base 21: mod_base = um
  modified_base 22: mod_base = cm
  modified_base 23: mod_base = um
  modified_base 1: mod_base = OTHER; note = Ethylene Vinyl Phosphate Modification
attgcttttattccaagaactct

SEQ ID NO: 552 - RNA, 23 nt, synthetic construct
  source 1..23: mol_type = other RNA
  modified_base 1: mod_base = OTHER; note = 2'-O- methyl
  modified_base 2: mod_base = OTHER; note = 2'- fluoro
  modified_base 3: mod_base = um
  modified_base 4: mod_base = gm
  modified_base 5: mod_base = cm
  modified_base 6: mod_base = OTHER; note = Glycerol nucleic acid
  modified_base 7: mod_base = um
  modified_base 8: mod_base = um
  modified_base 9: mod_base = um
  modified_base 10: mod_base = OTHER; note = 2'- fluoro
  modified_base 11: mod_base = um
  modified_base 12: mod_base = um
  modified_base 13: mod_base = cm
  modified_base 14: mod_base = OTHER; note = 2'- fluoro
  modified_base 15: mod_base = OTHER; note = 2'-O- methyl
  modified_base 16: mod_base = OTHER; note = 2'- fluoro
  modified_base 17: mod_base = gm
  modified_base 18: mod_base = OTHER; note = 2'-O- methyl
  modified_base 19: mod_base = OTHER; note = 2'-O- methyl
  modified_base 20: mod_base = cm
  modified_base 21: mod_base = um
  modified_base 22: mod_base = cm
  modified_base 23: mod_base = um
  modified_base 1: mod_base = OTHER; note = Ethylene Vinyl Phosphate Modification
attgcttttattccaagaactct

SEQ ID NO: 553 - RNA, 23 nt, synthetic construct
  source 1..23: mol_type = other RNA
  modified_base 1: mod_base = OTHER; note = 2'-O- methyl
  modified_base 2: mod_base = OTHER; note = 2'- fluoro
  modified_base 3: mod_base = um
  modified_base 4: mod_base = gm
  modified_base 5: mod_base = cm
  modified_base 6: mod_base = OTHER; note = 2'- fluoro
  modified_base 7: mod_base = OTHER; note = Glycerol nucleic acid
  modified_base 8: mod_base = um
  modified_base 9: mod_base = um
  modified_base 10: mod_base = OTHER; note = 2'- fluoro
  modified_base 11: mod_base = um
  modified_base 12: mod_base = um
  modified_base 13: mod_base = cm
  modified_base 14: mod_base = OTHER; note = 2'- fluoro
  modified_base 15: mod_base = OTHER; note = 2'-O- methyl
  modified_base 16: mod_base = OTHER; note = 2'- fluoro
  modified_base 17: mod_base = gm
  modified_base 18: mod_base = OTHER; note = 2'-O- methyl
  modified_base 19: mod_base = OTHER; note = 2'-O- methyl
  modified_base 20: mod_base = cm
  modified_base 21: mod_base = um
  modified_base 22: mod_base = cm
  modified_base 23: mod_base = um
  modified_base 1: mod_base = OTHER; note = Ethylene Vinyl Phosphate Modification
attgcttttattccaagaactct

SEQ ID NO: 554 - RNA, 23 nt, synthetic construct
  source 1..23: mol_type = other RNA
  modified_base 1: mod_base = OTHER; note = 2'-O- methyl
  modified_base 2: mod_base = OTHER; note = 2'- fluoro
  modified_base 3: mod_base = um
  modified_base 4: mod_base = gm
  modified_base 5: mod_base = cm
  modified_base 6: mod_base = OTHER; note = 2'- fluoro
  modified_base 7: mod_base = um
  modified_base 8: mod_base = OTHER; note = Glycerol nucleic acid
  modified_base 9: mod_base = um
  modified_base 10: mod_base = OTHER; note = 2'- fluoro
  modified_base 11: mod_base = um
  modified_base 12: mod_base = um
  modified_base 13: mod_base = cm
  modified_base 14: mod_base = OTHER; note = 2'- fluoro
  modified_base 15: mod_base = OTHER; note = 2'-O- methyl
  modified_base 16: mod_base = OTHER; note = 2'- fluoro
  modified_base 17: mod_base = gm
  modified_base 18: mod_base = OTHER; note = 2'-O- methyl
  modified_base 19: mod_base = OTHER; note = 2'-O- methyl
  modified_base 20: mod_base = cm
  modified_base 21: mod_base = um
  modified_base 22: mod_base = cm
  modified_base 23: mod_base = um
  modified_base 1: mod_base = OTHER; note = Ethylene Vinyl Phosphate Modification
attgcttttattccaagaactct

SEQ ID NO: 555 - RNA, 23 nt, synthetic construct
  source 1..23: mol_type = other RNA
  modified_base 1: mod_base = OTHER; note = 2'-O- methyl
  modified_base 2: mod_base = OTHER; note = 2'- fluoro
  modified_base 3: mod_base = um
  modified_base 4: mod_base = gm
  modified_base 6: mod_base = OTHER; note = 2'- fluoro
  modified_base 7: mod_base = um
  modified_base 8: mod_base = um
  modified_base 9: mod_base = um
  modified_base 10: mod_base = OTHER; note = 2'- fluoro
  modified_base 11: mod_base = um
  modified_base 12: mod_base = um
  modified_base 13: mod_base = cm
  modified_base 14: mod_base = OTHER; note = 2'- fluoro
  modified_base 15: mod_base = OTHER; note = 2'-O- methyl
  modified_base 16: mod_base = OTHER; note = 2'- fluoro
  modified_base 17: mod_base = gm
  modified_base 18: mod_base = OTHER; note = 2'-O- methyl
  modified_base 19: mod_base = OTHER; note = 2'-O- methyl
  modified_base 20: mod_base = cm
  modified_base 21: mod_base = um
  modified_base 22: mod_base = cm
  modified_base 23: mod_base = um
  modified_base 5: mod_base = OTHER; note = 2'-O-methyl Inosine
  modified_base 1: mod_base = OTHER; note = Ethylene Vinyl Phosphate Modification
attgnttttattccaagaactct

SEQ ID NO: 556 - RNA, 23 nt, synthetic construct
  source 1..23: mol_type = other RNA
  modified_base 1: mod_base = OTHER; note = 2'-O- methyl
  modified_base 2: mod_base = OTHER; note = 2'- fluoro
  modified_base 3: mod_base = um
  modified_base 4: mod_base = gm
  modified_base 5: mod_base = cm
  modified_base 7: mod_base = um
  modified_base 8: mod_base = um
  modified_base 9: mod_base = um
  modified_base 10: mod_base = OTHER; note = 2'- fluoro
  modified_base 11: mod_base = um
  modified_base 12: mod_base = um
  modified_base 13: mod_base = cm
  modified_base 14: mod_base = OTHER; note = 2'- fluoro
  modified_base 15: mod_base = OTHER; note = 2'-O- methyl
  modified_base 16: mod_base = OTHER; note = 2'- fluoro
  modified_base 17: mod_base = gm
  modified_base 18: mod_base = OTHER; note = 2'-O- methyl
  modified_base 19: mod_base = OTHER; note = 2'-O- methyl
  modified_base 20: mod_base = cm
  modified_base 21: mod_base = um
  modified_base 22: mod_base = cm
  modified_base 23: mod_base = um
  modified_base 6: mod_base = OTHER; note = 2'-O-methyl Inosine
  modified_base 1: mod_base = OTHER; note = Ethylene Vinyl Phosphate Modification
attgcntttattccaagaactct

SEQ ID NO: 557 - RNA, 23 nt, synthetic construct
  source 1..23: mol_type = other RNA
  modified_base 1: mod_base = OTHER; note = 2'-O- methyl
  modified_base 2: mod_base = OTHER; note = 2'- fluoro
  modified_base 3: mod_base = um
  modified_base 4: mod_base = gm
  modified_base 5: mod_base = cm
  modified_base 6: mod_base = OTHER; note = 2'- fluoro
  modified_base 8: mod_base = um
  modified_base 9: mod_base = um
  modified_base 10: mod_base = OTHER; note = 2'- fluoro
  modified_base 11: mod_base = um
  modified_base 12: mod_base = um
  modified_base 13: mod_base = cm
  modified_base 14: mod_base = OTHER; note = 2'- fluoro
  modified_base 15: mod_base = OTHER; note = 2'-O- methyl
  modified_base 16: mod_base = OTHER; note = 2'- fluoro
  modified_base 17: mod_base = gm
  modified_base 18: mod_base = OTHER; note = 2'-O- methyl
  modified_base 19: mod_base = OTHER; note = 2'-O- methyl
  modified_base 20: mod_base = cm
  modified_base 21: mod_base = um
  modified_base 22: mod_base = cm
  modified_base 23: mod_base = um
  modified_base 7: mod_base = OTHER; note = 2'-O-methyl Inosine
  modified_base 1: mod_base = OTHER; note = Ethylene Vinyl Phosphate Modification
attgctnttattccaagaactct

SEQ ID NO: 558 - RNA, 23 nt, synthetic construct
  source 1..23: mol_type = other RNA
  modified_base 1: mod_base = OTHER; note = 2'-O- methyl
  modified_base 2: mod_base = OTHER; note = 2'- fluoro
  modified_base 3: mod_base = um
  modified_base 4: mod_base = gm
  modified_base 5: mod_base = cm
  modified_base 6: mod_base = OTHER; note = 2'- fluoro
  modified_base 7: mod_base = um
  modified_base 9: mod_base = um
  modified_base 10: mod_base = OTHER; note = 2'- fluoro
  modified_base 11: mod_base = um
  modified_base 12: mod_base = um
  modified_base 13: mod_base = cm
  modified_base 14: mod_base = OTHER; note = 2'- fluoro
  modified_base 15: mod_base = OTHER; note = 2'-O- methyl
  modified_base 16: mod_base = OTHER; note = 2'- fluoro
  modified_base 17: mod_base = gm
  modified_base 18: mod_base = OTHER; note = 2'-O- methyl
  modified_base 19: mod_base = OTHER; note = 2'-O- methyl
  modified_base 20: mod_base = cm
  modified_base 21: mod_base = um
  modified_base 22: mod_base = cm
  modified_base 23: mod_base = um
  modified_base 8: mod_base = OTHER; note = 2'-O-methyl Inosine
  modified_base 1: mod_base = OTHER; note = Ethylene Vinyl Phosphate Modification
attgcttntattccaagaactct

SEQ ID NO: 559 - RNA, 19 nt, synthetic construct
  source 1..19: mol_type = other RNA
  modified_base 1: mod_base = cm
  modified_base 2: mod_base = OTHER; note = 2'-O- methyl
  modified_base 3: mod_base = OTHER; note = 2'-O- methyl
  modified_base 4: mod_base = OTHER; note = 2'-O- methyl
  modified_base 5: mod_base = OTHER; note = 2'-O- methyl
  modified_base 6: mod_base = gm
  modified_base 7: mod_base = OTHER; note = 2'- fluoro
  modified_base 8: mod_base = OTHER; note = 2'- fluoro
  modified_base 9: mod_base = OTHER; note = 2'- fluoro
  modified_base 10: mod_base = um
  modified_base 11: mod_base = cm
  modified_base 12: mod_base = um
  modified_base 13: mod_base = cm
  modified_base 14: mod_base = OTHER; note = 2'-O- methyl
  modified_base 15: mod_base = gm
  modified_base 16: mod_base = OTHER; note = 2'-O- methyl
  modified_base 17: mod_base = OTHER; note = 2'-O- methyl
  modified_base 18: mod_base = cm
  modified_base 19: mod_base = OTHER; note = 2'-O- methyl
  misc_binding 19: bound_moiety = L96
caaaagcaatctcagaaca

SEQ ID NO: 560 - RNA, 21 nt, synthetic construct
  source 1..21: mol_type = other RNA
  modified_base 1: mod_base = um
  modified_base 2: mod_base = OTHER; note = 2'- fluoro
  modified_base 3: mod_base = um
  modified_base 4: mod_base = um
  modified_base 5: mod_base = OTHER; note = Glycerol nucleic acid
  modified_base 6: mod_base = OTHER; note = 2'- fluoro
  modified_base 7: mod_base = gm
  modified_base 8: mod_base = OTHER; note = 2'-O- methyl
  modified_base 9: mod_base = gm
  modified_base 10: mod_base = gm
  modified_base 11: mod_base = um
  modified_base 12: mod_base = um
  modified_base 13: mod_base = gm
  modified_base 14: mod_base = OTHER; note = 2'- fluoro
  modified_base 15: mod_base = um
  modified_base 16: mod_base = OTHER; note = 2'- fluoro
  modified_base 17: mod_base = um
  modified_base 18: mod_base = um
  modified_base 19: mod_base = gm
  modified_base 20: mod_base = um
  modified_base 21: mod_base = um
  modified_base 1: mod_base = OTHER; note = Ethylene Vinyl Phosphate Modification
tgttctgaggttgcttttgtt

SEQ ID NO: 561 - RNA, 21 nt, synthetic construct
  source 1..21: mol_type = other RNA
  modified_base 1: mod_base = um
  modified_base 2: mod_base = OTHER; note = 2'- fluoro
  modified_base 3: mod_base = um
  modified_base 4: mod_base = um
  modified_base 5: mod_base = cm
  modified_base 6: mod_base = OTHER; note = Glycerol nucleic acid
  modified_base 7: mod_base = gm
  modified_base 8: mod_base = OTHER; note = 2'-O- methyl
  modified_base 9: mod_base = gm
  modified_base 10: mod_base = gm
  modified_base 11: mod_base = um
  modified_base 12: mod_base = um
  modified_base 13: mod_base = gm
  modified_base 14: mod_base = OTHER; note = 2'- fluoro
  modified_base 15: mod_base = um
  modified_base 16: mod_base = OTHER; note = 2'- fluoro
  modified_base 17: mod_base = um
  modified_base 18: mod_base = um
  modified_base 19: mod_base = gm
  modified_base 20: mod_base = um
  modified_base 21: mod_base = um
  modified_base 1: mod_base = OTHER; note = Ethylene Vinyl Phosphate Modification
tgttctgaggttgcttttgtt

SEQ ID NO: 562 - RNA, 21 nt, synthetic construct
  source 1..21: mol_type = other RNA
  modified_base 1: mod_base = um
  modified_base 2: mod_base = OTHER; note = 2'- fluoro
  modified_base 3: mod_base = um
  modified_base 4: mod_base = um
  modified_base 5: mod_base = cm
  modified_base 6: mod_base = OTHER; note = 2'- fluoro
  modified_base 7: mod_base = OTHER; note = Glycerol nucleic acid
  modified_base 8: mod_base = OTHER; note = 2'-O- methyl
  modified_base 9: mod_base = gm
  modified_base 10: mod_base = gm
  modified_base 11: mod_base = um
  modified_base 12: mod_base = um
  modified_base 13: mod_base = gm
  modified_base 14: mod_base = OTHER; note = 2'- fluoro
  modified_base 15: mod_base = um
  modified_base 16: mod_base = OTHER; note = 2'- fluoro
  modified_base 17: mod_base = um
  modified_base 18: mod_base = um
  modified_base 19: mod_base = gm
  modified_base 20: mod_base = um
  modified_base 21: mod_base = um
  modified_base 1: mod_base = OTHER; note = Ethylene Vinyl Phosphate Modification
tgttctgaggttgcttttgtt

SEQ ID NO: 563 - RNA, 21 nt, synthetic construct
  source 1..21: mol_type = other RNA
  modified_base 1: mod_base = um
  modified_base 2: mod_base = OTHER; note = 2'- fluoro
  modified_base 3: mod_base = um
  modified_base 4: mod_base = um
  modified_base 5: mod_base = cm
  modified_base 6: mod_base = OTHER; note = 2'- fluoro
  modified_base 7: mod_base = gm
  modified_base 8: mod_base = OTHER; note = Glycerol nucleic acid
  modified_base 9: mod_base = gm
  modified_base 10: mod_base = gm
  modified_base 11: mod_base = um
  modified_base 12: mod_base = um
  modified_base 13: mod_base = gm
  modified_base 14: mod_base = OTHER; note = 2'- fluoro
  modified_base 15: mod_base = um
  modified_base 16: mod_base = OTHER; note = 2'- fluoro
  modified_base 17: mod_base = um
  modified_base 18: mod_base = um
  modified_base 19: mod_base = gm
  modified_base 20: mod_base = um
  modified_base 21: mod_base = um
  modified_base 1: mod_base = OTHER; note = Ethylene Vinyl Phosphate Modification
tgttctgaggttgcttttgtt

SEQ ID NO: 564 - RNA, 21 nt, synthetic construct
  source 1..21: mol_type = other RNA
  modified_base 1: mod_base = um
  modified_base 2: mod_base = OTHER; note = 2'- fluoro
  modified_base 3: mod_base = um
  modified_base 4: mod_base = um
  modified_base 5: mod_base = cm
  modified_base 7: mod_base = gm
  modified_base 8: mod_base = OTHER; note = 2'-O- methyl
  modified_base 9: mod_base = gm
  modified_base 10: mod_base = gm
  modified_base 11: mod_base = um
  modified_base 12: mod_base = um
  modified_base 13: mod_base = gm
  modified_base 14: mod_base = OTHER; note = 2'- fluoro
  modified_base 15: mod_base = um
  modified_base 16: mod_base = OTHER; note = 2'- fluoro
  modified_base 17: mod_base = um
  modified_base 18: mod_base = um
  modified_base 19: mod_base = gm
  modified_base 20: mod_base = um
  modified_base 21: mod_base = um
  modified_base 6: mod_base = OTHER; note = 2'-O-methyl Inosine
  modified_base 1: mod_base = OTHER; note = Ethylene Vinyl Phosphate Modification
tgttcngaggttgcttttgtt

SEQ ID NO: 565 - RNA, 21 nt, synthetic construct
  source 1..21: mol_type = other RNA
  modified_base 1: mod_base = um
  modified_base 2: mod_base = OTHER; note = 2'- fluoro
  modified_base 3: mod_base = um
  modified_base 4: mod_base = um
  modified_base 5: mod_base = cm
  modified_base 6: mod_base = OTHER; note = 2'- fluoro
  modified_base 8: mod_base = OTHER; note = 2'-O- methyl
  modified_base 9: mod_base = gm
  modified_base 10: mod_base = gm
  modified_base 11: mod_base = um
  modified_base 12: mod_base = um
  modified_base 13: mod_base = gm
  modified_base 14: mod_base = OTHER; note = 2'- fluoro
  modified_base 15: mod_base = um
  modified_base 16: mod_base = OTHER; note = 2'- fluoro
  modified_base 17: mod_base = um
  modified_base 18: mod_base = um
  modified_base 19: mod_base = gm
  modified_base 20: mod_base = um
  modified_base 21: mod_base = um
  modified_base 7: mod_base = OTHER; note = 2'-O-methyl Inosine
  modified_base 1: mod_base = OTHER; note = Ethylene Vinyl Phosphate Modification
tgttctnaggttgcttttgtt

SEQ ID NO: 566 - RNA, 21 nt, synthetic construct
  source 1..21: mol_type = other RNA
  modified_base 1: mod_base = um
  modified_base 2: mod_base = OTHER; note = 2'- fluoro
  modified_base 3: mod_base = um
  modified_base 4: mod_base = um
  modified_base 5: mod_base = cm
  modified_base 6: mod_base = OTHER; note = 2'- fluoro
  modified_base 7: mod_base = gm
  modified_base 9: mod_base = gm
  modified_base 10: mod_base = gm
  modified_base 11: mod_base = um
  modified_base 12: mod_base = um
  modified_base 13: mod_base = gm
  modified_base 14: mod_base = OTHER; note = 2'- fluoro
  modified_base 15: mod_base = um
  modified_base 16: mod_base = OTHER; note = 2'- fluoro
  modified_base 17: mod_base = um
  modified_base 18: mod_base = um
  modified_base 19: mod_base = gm
  modified_base 20: mod_base = um
  modified_base 21: mod_base = um
  modified_base 8: mod_base = OTHER; note = 2'-O-methyl Inosine
  modified_base 1: mod_base = OTHER; note = Ethylene Vinyl Phosphate Modification
tgttctgnggttgcttttgtt

SEQ ID NO: 567 - RNA, 23 nt, synthetic construct
  source 1..23: mol_type = other RNA
  modified_base 1: mod_base = OTHER; note = 2'-O- methyl
  modified_base 2: mod_base = OTHER; note = 2'- fluoro
  modified_base 3: mod_base = um
  modified_base 4: mod_base = gm
  modified_base 5: mod_base = cm
  modified_base 6: mod_base = OTHER; note = 2'- fluoro
  modified_base 7: mod_base = um
  modified_base 8: mod_base = um
  modified_base 9: mod_base = um
  modified_base 10: mod_base = OTHER; note = 2'-O- methyl
  modified_base 11: mod_base = um
  modified_base 12: mod_base = um
  modified_base 13: mod_base = cm
  modified_base 14: mod_base = OTHER; note = 2'- fluoro
  modified_base 15: mod_base = OTHER; note = 2'-O- methyl
  modified_base 16: mod_base = OTHER; note = 2'- fluoro
  modified_base 17: mod_base = gm
  modified_base 18: mod_base = OTHER; note = 2'-O- methyl
  modified_base 19: mod_base = OTHER; note = 2'-O- methyl
  modified_base 20: mod_base = cm
  modified_base 21: mod_base = um
  modified_base 22: mod_base = um
  modified_base 23: mod_base = um
  modified_base 1: mod_base = OTHER; note = Ethylene Vinyl Phosphate Modification
attgcttttattccaagaacttt

SEQ ID NO: 568 - RNA, 23 nt, synthetic construct
  source 1..23: mol_type = other RNA
  modified_base 1: mod_base = OTHER; note = 2'-O- methyl
  modified_base 2: mod_base = OTHER; note = 2'- fluoro
  modified_base 3: mod_base = um
  modified_base 4: mod_base = gm
  modified_base 5: mod_base = cm
  modified_base 6: mod_base = OTHER; note = 2'- fluoro
  modified_base 7: mod_base = um
  modified_base 8: mod_base = OTHER; note = 2'- fluoro
  modified_base 9: mod_base = OTHER; note = 2'- fluoro
  modified_base 10: mod_base = OTHER; note = 2'-O- methyl
  modified_base 11: mod_base = um
  modified_base 12: mod_base = um
  modified_base 13: mod_base = cm
  modified_base 14: mod_base = OTHER; note = 2'- fluoro
  modified_base 15: mod_base = OTHER; note = 2'-O- methyl
  modified_base 16: mod_base = OTHER; note = 2'- fluoro
  modified_base 17: mod_base = gm
  modified_base 18: mod_base = OTHER; note = 2'-O- methyl
  modified_base 19: mod_base = OTHER; note = 2'-O- methyl
  modified_base 20: mod_base = cm
  modified_base 21: mod_base = um
  modified_base 22: mod_base = um
  modified_base 23: mod_base = um
  modified_base 1: mod_base = OTHER; note = Ethylene Vinyl Phosphate Modification
attgcttttattccaagaacttt

SEQ ID NO: 569 - RNA, 23 nt, synthetic construct
  source 1..23: mol_type = other RNA
  modified_base 1: mod_base = OTHER; note = 2'-O- methyl
  modified_base 2: mod_base = OTHER; note = 2'- fluoro
  modified_base 3: mod_base = um
  modified_base 4: mod_base = gm
  modified_base 5: mod_base = OTHER; note = 2'- fluoro
  modified_base 6: mod_base = OTHER; note = 2'- fluoro
  modified_base 7: mod_base = um
  modified_base 8: mod_base = um
  modified_base 9: mod_base = um
  modified_base 10: mod_base = OTHER; note = 2'-O- methyl
  modified_base 11: mod_base = um
  modified_base 12: mod_base = um
  modified_base 13: mod_base = cm
  modified_base 14: mod_base = OTHER; note = 2'- fluoro
  modified_base 15: mod_base = OTHER; note = 2'-O- methyl
  modified_base 16: mod_base = OTHER; note = 2'- fluoro
  modified_base 17: mod_base = gm
  modified_base 18: mod_base = OTHER; note = 2'-O- methyl
  modified_base 19: mod_base = OTHER; note = 2'-O- methyl
  modified_base 20: mod_base = cm
  modified_base 21: mod_base = um
  modified_base 22: mod_base = um
  modified_base 23: mod_base = um
  modified_base 1: mod_base = OTHER; note = Ethylene Vinyl Phosphate Modification
attgcttttattccaagaacttt

SEQ ID NO: 570 - RNA, 23 nt, synthetic construct
  source 1..23: mol_type = other RNA
  modified_base 1: mod_base = OTHER; note = 2'-O- methyl
  modified_base 2: mod_base = OTHER; note = 2'- fluoro
  modified_base 3: mod_base = um
  modified_base 4: mod_base = gm
  modified_base 5: mod_base = cm
  modified_base 6: mod_base = OTHER; note = 2'- fluoro
  modified_base 7: mod_base = um
  modified_base 8: mod_base = um
  modified_base 9: mod_base = um
  modified_base 10: mod_base = OTHER; note = 2'- fluoro
  modified_base 11: mod_base = um
  modified_base 12: mod_base = um
  modified_base 13: mod_base = cm
  modified_base 14: mod_base = OTHER; note = 2'- fluoro
  modified_base 15: mod_base = OTHER; note = 2'-O- methyl
  modified_base 16: mod_base = OTHER; note = 2'- fluoro
  modified_base 17: mod_base = gm
  modified_base 18: mod_base = OTHER; note = 2'-O- methyl
  modified_base 19: mod_base = OTHER; note = 2'-O- methyl
  modified_base 20: mod_base = cm
  modified_base 21: mod_base = um
  modified_base 22: mod_base = um
  modified_base 23: mod_base = um
  modified_base 1: mod_base = OTHER; note = Ethylene Vinyl Phosphate Modification
attgcttttattccaagaacttt

SEQ ID NO: 571 - RNA, 21 nt, synthetic construct
  source 1..21: mol_type = other RNA
  modified_base 1: mod_base = um
  modified_base 2: mod_base = OTHER; note = 2'- fluoro
  modified_base 3: mod_base = um
  modified_base 4: mod_base = um
  modified_base 5: mod_base = cm
  modified_base 6: mod_base = OTHER; note = 2'- fluoro
  modified_base 7: mod_base = gm
  modified_base 8: mod_base = OTHER; note = 2'-O- methyl
  modified_base 9: mod_base = gm
  modified_base 10: mod_base = gm
  modified_base 11: mod_base = um
  modified_base 12: mod_base = um
  modified_base 13: mod_base = gm
  modified_base 14: mod_base = OTHER; note = 2'- fluoro
  modified_base 15: mod_base = um
  modified_base 16: mod_base = OTHER; note = 2'- fluoro
  modified_base 17: mod_base = um
  modified_base 18: mod_base = um
  modified_base 19: mod_base = gm
  modified_base 20: mod_base = um
  modified_base 21: mod_base = um
  modified_base 1: mod_base = OTHER; note = Ethylene Vinyl Phosphate Modification
tgttctgaggttgcttttgtt

SEQ ID NO: 572 - RNA, 19 nt, synthetic construct
  source 1..19: mol_type = other RNA
  modified_base 1: mod_base = OTHER; note = 2'-O- methyl
  modified_base 2: mod_base = gm
  modified_base 3: mod_base = OTHER; note = 2'-O- methyl
  modified_base 4: mod_base = gm
  modified_base 5: mod_base = um
  modified_base 6: mod_base = um
  modified_base 7: mod_base = OTHER; note = 2'- fluoro
  modified_base 8: mod_base = OTHER; note = 2'- fluoro
  modified_base 9: mod_base = OTHER; note = 2'- fluoro
  modified_base 10: mod_base = gm
  modified_base 11: mod_base = gm
  modified_base 12: mod_base = OTHER; note = 2'-O- methyl
  modified_base 13: mod_base = OTHER; note = 2'-O- methyl
  modified_base 14: mod_base = um
  modified_base 15: mod_base = OTHER; note = 2'-O- methyl
  modified_base 16: mod_base = OTHER; note = 2'-O- methyl
  modified_base 17: mod_base = OTHER; note = 2'-O- methyl
  modified_base 18: mod_base = OTHER; note = 2'-O- methyl
  modified_base 19: mod_base = OTHER; note = 2'-O- methyl
  misc_binding 19: bound_moiety = L96
agagttcttggaataaaaa

SEQ ID NO: 573 - RNA, 21 nt, synthetic construct
  source 1..21: mol_type = other RNA
  modified_base 1: mod_base = um
  modified_base 2: mod_base = OTHER; note = 2'- fluoro
  modified_base 3: mod_base = um
  modified_base 4: mod_base = um
  modified_base 5: mod_base = um
  modified_base 6: mod_base = OTHER; note = 2'- fluoro
  modified_base 7: mod_base = um
  modified_base 8: mod_base = um
  modified_base 9: mod_base = cm
  modified_base 10: mod_base = cm
  modified_base 11: mod_base = OTHER; note = 2'-O- methyl
  modified_base 12: mod_base = OTHER; note = 2'-O- methyl
  modified_base 13: mod_base = gm
  modified_base 14: mod_base = OTHER; note = 2'- fluoro
  modified_base 15: mod_base = OTHER; note = 2'-O- methyl
  modified_base 16: mod_base = OTHER; note = 2'- fluoro
  modified_base 17: mod_base = um
  modified_base 18: mod_base = cm
  modified_base 19: mod_base = um
  modified_base 20: mod_base = gm
  modified_base 21: mod_base = um
tttttattccaagaactctgt

SEQ ID NO: 574 - RNA, 19 nt, synthetic construct
  source 1..19: mol_type = other RNA
  modified_base 1: mod_base = OTHER; note = 2'-O- methyl
  modified_base 2: mod_base = gm
  modified_base 3: mod_base = OTHER; note = 2'-O- methyl
  modified_base 4: mod_base = gm
  modified_base 5: mod_base = OTHER; note = 2'- fluoro
  modified_base 6: mod_base = um
  modified_base 7: mod_base = OTHER; note = 2'- fluoro
  modified_base 8: mod_base = OTHER; note = 2'- fluoro
  modified_base 9: mod_base = OTHER; note = 2'- fluoro
  modified_base 10: mod_base = gm
  modified_base 11: mod_base = gm
  modified_base 12: mod_base = OTHER; note = 2'-O- methyl
  modified_base 13: mod_base = OTHER; note = 2'-O- methyl
  modified_base 14: mod_base = um
  modified_base 15: mod_base = OTHER; note = 2'-O- methyl
  modified_base 16: mod_base = OTHER; note = 2'-O- methyl
  modified_base 17: mod_base = OTHER; note = 2'-O- methyl
  modified_base 18: mod_base = OTHER; note = 2'-O- methyl
  modified_base 19: mod_base = OTHER; note = 2'-O- methyl
  misc_binding 19: bound_moiety = L96
agagttcttggaataaaaa

SEQ ID NO: 575 - RNA, 21 nt, synthetic construct
  source 1..21: mol_type = other RNA
  modified_base 1: mod_base = um
  modified_base 2: mod_base = OTHER; note = 2'- fluoro
  modified_base 3: mod_base = um
  modified_base 4: mod_base = um
  modified_base 5: mod_base = um
  modified_base 6: mod_base = OTHER; note = 2'- fluoro
  modified_base 7: mod_base = um
  modified_base 8: mod_base = OTHER; note = 2'- fluoro
  modified_base 9: mod_base = OTHER; note = 2'- fluoro
  modified_base 10: mod_base = cm
  modified_base 11: mod_base = OTHER; note = 2'-O- methyl
  modified_base 12: mod_base = OTHER; note = 2'-O- methyl
  modified_base 13: mod_base = gm
  modified_base 14: mod_base = OTHER; note = 2'- fluoro
  modified_base 15: mod_base = OTHER; note = 2'-O- methyl
  modified_base 16: mod_base = OTHER; note = 2'- fluoro
  modified_base 17: mod_base = um
  modified_base 18: mod_base = cm
  modified_base 19: mod_base = um
  modified_base 20: mod_base = gm
  modified_base 21: mod_base = um
tttttattccaagaactctgt

SEQ ID NO: 576 - RNA, 20 nt, synthetic construct
  source 1..20: mol_type = other RNA
  modified_base 1: mod_base = cm
  modified_base 2: mod_base = OTHER; note = 2'-O- methyl
  modified_base 3: mod_base = gm
  modified_base 4: mod_base = OTHER; note = 2'-O- methyl
  modified_base 5: mod_base = gm
  modified_base 6: mod_base = um
  modified_base 7: mod_base = um
  modified_base 8: mod_base = OTHER; note = 2'- fluoro
  modified_base 9: mod_base = OTHER; note = 2'- fluoro
  modified_base 10: mod_base = OTHER; note = 2'- fluoro
  modified_base 11: mod_base = gm
  modified_base 12: mod_base = gm
  modified_base 13: mod_base = OTHER; note = 2'-O- methyl
  modified_base 14: mod_base = OTHER; note = 2'-O- methyl
  modified_base 15: mod_base = um
  modified_base 16: mod_base = OTHER; note = 2'-O- methyl
  modified_base 17: mod_base = OTHER; note = 2'-O- methyl
  modified_base 18: mod_base = OTHER; note = 2'-O- methyl
  modified_base 19: mod_base = OTHER; note = 2'-O- methyl
  modified_base 20: mod_base = OTHER; note = 2'-O- methyl
  misc_binding 20: bound_moiety = L96
cagagttcttggaataaaaa

SEQ ID NO: 577 - RNA, 22 nt, synthetic construct
  source 1..22: mol_type = other RNA
  modified_base 1: mod_base = um
  modified_base 2: mod_base = OTHER; note = 2'- fluoro
  modified_base 3: mod_base = um
  modified_base 4: mod_base = um
  modified_base 5: mod_base = um
  modified_base 6: mod_base = OTHER; note = 2'- fluoro
  modified_base 7: mod_base = um
  modified_base 8: mod_base = um
  modified_base 9: mod_base = cm
  modified_base 10: mod_base = cm
  modified_base 11: mod_base = OTHER; note = 2'-O- methyl
  modified_base 12: mod_base = OTHER; note = 2'-O- methyl
  modified_base 13: mod_base = gm
  modified_base 14: mod_base = OTHER; note = 2'- fluoro
  modified_base 15: mod_base = OTHER; note = 2'-O- methyl
  modified_base 16: mod_base = OTHER; note = 2'- fluoro
  modified_base 17: mod_base = um
  modified_base 18: mod_base = cm
  modified_base 19: mod_base = um
  modified_base 20: mod_base = gm
  modified_base 21: mod_base = um
  modified_base 22: mod_base = gm
tttttattccaagaactctgtg

SEQ ID NO: 578 - RNA, 20 nt, synthetic construct
  source 1..20: mol_type = other RNA
  modified_base 1: mod_base = cm
  modified_base 2: mod_base = OTHER; note = 2'-O- methyl
  modified_base 3: mod_base = gm
  modified_base 4: mod_base = OTHER; note = 2'-O- methyl
  modified_base 5: mod_base = gm
  modified_base 6: mod_base = OTHER; note = 2'- fluoro
  modified_base 7: mod_base = um
  modified_base 8: mod_base = OTHER; note = 2'- fluoro
  modified_base 9: mod_base = OTHER; note = 2'- fluoro
  modified_base 10: mod_base = OTHER; note = 2'- fluoro
  modified_base 11: mod_base = gm
  modified_base 12: mod_base = gm
  modified_base 13: mod_base = OTHER; note = 2'-O- methyl
  modified_base 14: mod_base = OTHER; note = 2'-O- methyl
  modified_base 15: mod_base = um
  modified_base 16: mod_base = OTHER; note = 2'-O- methyl
  modified_base 17: mod_base = OTHER; note = 2'-O- methyl
  modified_base 18: mod_base = OTHER; note = 2'-O- methyl
  modified_base 19: mod_base = OTHER; note = 2'-O- methyl
  modified_base 20: mod_base = OTHER; note = 2'-O- methyl
  misc_binding 20: bound_moiety = L96
cagagttcttggaataaaaa

SEQ ID NO: 579 - RNA, 22 nt, synthetic construct
  source 1..22: mol_type = other RNA
  modified_base 1: mod_base = um
  modified_base 2: mod_base = OTHER; note = 2'- fluoro
  modified_base 3: mod_base = um
  modified_base 4: mod_base = um
  modified_base 5: mod_base = um
  modified_base 6: mod_base = OTHER; note = 2'- fluoro
  modified_base 7: mod_base = um
  modified_base 8: mod_base = OTHER; note = 2'- fluoro
  modified_base 9: mod_base = OTHER; note = 2'- fluoro
  modified_base 10: mod_base = cm
  modified_base 11: mod_base = OTHER; note = 2'-O- methyl
  modified_base 12: mod_base = OTHER; note = 2'-O- methyl
  modified_base 13: mod_base = gm
  modified_base 14: mod_base = OTHER; note = 2'- fluoro
  modified_base 15: mod_base = OTHER; note = 2'-O- methyl
  modified_base 16: mod_base = OTHER; note = 2'- fluoro
  modified_base 17: mod_base = um
  modified_base 18: mod_base = cm
  modified_base 19: mod_base = um
  modified_base 20: mod_base = gm
  modified_base 21: mod_base = um
  modified_base 22: mod_base = gm
tttttattccaagaactctgtg

SEQ ID NO: 580 - RNA, 21 nt, synthetic construct
  source 1..21: mol_type = other RNA
  modified_base 1: mod_base = OTHER; note = 2'-O- methyl
  modified_base 2: mod_base = cm
  modified_base 3: mod_base = OTHER; note = 2'-O- methyl
  modified_base 4: mod_base = gm
  modified_base 5: mod_base = OTHER; note = 2'-O- methyl
  modified_base 6: mod_base = gm
  modified_base 7: mod_base = um
  modified_base 8: mod_base = um
  modified_base 9: mod_base = OTHER; note = 2'- fluoro
  modified_base 10: mod_base = OTHER; note = 2'- fluoro
  modified_base 11: mod_base = OTHER; note = 2'- fluoro
  modified_base 12: mod_base = gm
  modified_base 13: mod_base = gm
  modified_base 14: mod_base = OTHER; note = 2'-O- methyl
  modified_base 15: mod_base = OTHER; note = 2'-O- methyl
  modified_base 16: mod_base = um
  modified_base 17: mod_base = OTHER; note = 2'-O- methyl
  modified_base 18: mod_base = OTHER; note = 2'-O- methyl
  modified_base 19: mod_base = OTHER; note = 2'-O- methyl
  modified_base 20: mod_base = OTHER; note = 2'-O- methyl
  modified_base 21: mod_base = OTHER; note = 2'-O- methyl
  misc_binding 21: bound_moiety = L96
acagagttcttggaataaaaa

SEQ ID NO: 581 - RNA, 23 nt, synthetic construct
  source 1..23: mol_type = other RNA
  modified_base 1: mod_base = um
  modified_base 2: mod_base = OTHER; note = 2'- fluoro
  modified_base 3: mod_base = um
  modified_base 4: mod_base = um
  modified_base 5: mod_base = um
  modified_base 6: mod_base = OTHER; note = 2'- fluoro
  modified_base 7: mod_base = um
  modified_base 8: mod_base = um
  modified_base 9: mod_base = cm
  modified_base 10: mod_base = cm
  modified_base 11: mod_base = OTHER; note = 2'-O- methyl
  modified_base 12: mod_base = OTHER; note = 2'-O- methyl
  modified_base 13: mod_base = gm
  modified_base 14: mod_base = OTHER; note = 2'- fluoro
  modified_base 15: mod_base = OTHER; note = 2'-O- methyl
  modified_base 16: mod_base = OTHER; note = 2'- fluoro
  modified_base 17: mod_base = um
  modified_base 18: mod_base = cm
  modified_base 19: mod_base = um
  modified_base 20: mod_base = gm
  modified_base 21: mod_base = um
  modified_base 22: mod_base = gm
  modified_base 23: mod_base = OTHER; note = 2'-O- methyl
tttttattccaagaactctgtga

SEQ ID NO: 582 - RNA, 21 nt, synthetic construct
  source 1..21: mol_type = other RNA
  modified_base 1: mod_base = OTHER; note = 2'-O- methyl
  modified_base 2: mod_base = cm
  modified_base 3: mod_base = OTHER; note = 2'-O- methyl
  modified_base 4: mod_base = gm
  modified_base 5: mod_base = OTHER; note = 2'-O- methyl
  modified_base 6: mod_base = gm
  modified_base 7: mod_base = OTHER; note = 2'- fluoro
  modified_base 8: mod_base = um
  modified_base 9: mod_base = OTHER; note = 2'- fluoro
  modified_base 10: mod_base = OTHER; note = 2'- fluoro
  modified_base 11: mod_base = OTHER; note = 2'- fluoro
  modified_base 12: mod_base = gm
  modified_base 13: mod_base = gm
  modified_base 14: mod_base = OTHER; note = 2'-O- methyl
  modified_base 15: mod_base = OTHER; note = 2'-O- methyl
  modified_base 16: mod_base = um
  modified_base 17: mod_base = OTHER; note = 2'-O- methyl
  modified_base 18: mod_base = OTHER; note = 2'-O- methyl
  modified_base 19: mod_base = OTHER; note = 2'-O- methyl
  modified_base 20: mod_base = OTHER; note = 2'-O- methyl
  modified_base 21: mod_base = OTHER; note = 2'-O- methyl
  misc_binding 21: bound_moiety = L96
acagagttcttggaataaaaa

SEQ ID NO: 583 - RNA, 23 nt, synthetic construct
  source 1..23: mol_type = other RNA
  modified_base 1: mod_base = um
  modified_base 2: mod_base = OTHER; note = 2'- fluoro
  modified_base 3: mod_base = um
  modified_base 4: mod_base = um
  modified_base 5: mod_base = um
  modified_base 6: mod_base = OTHER; note = 2'- fluoro
  modified_base 7: mod_base = um
  modified_base 8: mod_base = OTHER; note = 2'- fluoro
  modified_base 9: mod_base = OTHER; note = 2'- fluoro
  modified_base 10: mod_base = cm
  modified_base 11: mod_base = OTHER; note = 2'-O- methyl
  modified_base 12: mod_base = OTHER; note = 2'-O- methyl
  modified_base 13: mod_base = gm
  modified_base 14: mod_base = OTHER; note = 2'- fluoro
  modified_base 15: mod_base = OTHER; note = 2'-O- methyl
  modified_base 16: mod_base = OTHER; note = 2'- fluoro
  modified_base 17: mod_base = um
  modified_base 18: mod_base = cm
  modified_base 19: mod_base = um
  modified_base 20: mod_base = gm
  modified_base 21: mod_base = um
  modified_base 22: mod_base = gm
  modified_base 23: mod_base = OTHER; note = 2'-O- methyl
tttttattccaagaactctgtga

SEQ ID NO: 584 - RNA, 21 nt, synthetic construct
  source 1..21: mol_type = other RNA
  modified_base 1: mod_base = um
  modified_base 2: mod_base = OTHER; note = 2'- fluoro
  modified_base 3: mod_base = um
  modified_base 4: mod_base = um
  modified_base 5: mod_base = um
  modified_base 6: mod_base = OTHER; note = 2'- fluoro
  modified_base 7: mod_base = um
  modified_base 8: mod_base = um
  modified_base 9: mod_base = cm
  modified_base 10: mod_base = cm
  modified_base 11: mod_base = OTHER; note = 2'-O- methyl
  modified_base 12: mod_base = OTHER; note = 2'-O- methyl
  modified_base 13: mod_base = gm
  modified_base 14: mod_base = OTHER; note = 2'- fluoro
  modified_base 15: mod_base = OTHER; note = 2'-O- methyl
  modified_base 16: mod_base = OTHER; note = 2'- fluoro
  modified_base 17: mod_base = um
  modified_base 18: mod_base = cm
  modified_base 19: mod_base = um
  modified_base 20: mod_base = gm
  modified_base 21: mod_base = um
  modified_base 1: mod_base = OTHER; note = Ethylene Vinyl Phosphate Modification
tttttattccaagaactctgt

SEQ ID NO: 585 - RNA, 21 nt, synthetic construct
  source 1..21: mol_type = other RNA
  modified_base 1: mod_base = um
  modified_base 2: mod_base = OTHER; note = 2'- fluoro
  modified_base 3: mod_base = um
  modified_base 4: mod_base = um
  modified_base 5: mod_base = um
  modified_base 6: mod_base = OTHER; note = 2'- fluoro
  modified_base 7: mod_base = um
  modified_base 8: mod_base = OTHER; note = 2'- fluoro
  modified_base 9: mod_base = OTHER; note = 2'- fluoro
  modified_base 10: mod_base = cm
  modified_base 11: mod_base = OTHER; note = 2'-O- methyl
  modified_base 12: mod_base = OTHER; note = 2'-O- methyl
  modified_base 13: mod_base = gm
  modified_base 14: mod_base = OTHER; note = 2'- fluoro
  modified_base 15: mod_base = OTHER; note = 2'-O- methyl
  modified_base 16: mod_base = OTHER; note = 2'- fluoro
  modified_base 17: mod_base = um
  modified_base 18: mod_base = cm
  modified_base 19: mod_base = um
  modified_base 20: mod_base = gm
  modified_base 21: mod_base = um
  modified_base 1: mod_base = OTHER; note = Ethylene Vinyl Phosphate Modification
tttttattccaagaactctgt

SEQ ID NO: 586 - RNA, 22 nt, synthetic construct
  source 1..22: mol_type = other RNA
  modified_base 1: mod_base = um
  modified_base 2: mod_base = OTHER; note = 2'- fluoro
  modified_base 3: mod_base = um
  modified_base 4: mod_base = um
  modified_base 5: mod_base = um
  modified_base 6: mod_base = OTHER; note = 2'- fluoro
  modified_base 7: mod_base = um
  modified_base 8: mod_base = um
  modified_base 9: mod_base = cm
  modified_base 10: mod_base = cm
  modified_base 11: mod_base = OTHER; note = 2'-O- methyl
  modified_base 12: mod_base = OTHER; note = 2'-O- methyl
  modified_base 13: mod_base = gm
  modified_base 14: mod_base = OTHER; note = 2'- fluoro
  modified_base 15: mod_base = OTHER; note = 2'-O- methyl
  modified_base 16: mod_base = OTHER; note = 2'- fluoro
  modified_base 17: mod_base = um
  modified_base 18: mod_base = cm
  modified_base 19: mod_base = um
  modified_base 20: mod_base = gm
  modified_base 21: mod_base = um
  modified_base 22: mod_base = gm
  modified_base 1: mod_base = OTHER; note = Ethylene Vinyl Phosphate Modification
tttttattccaagaactctgtg

SEQ ID NO: 587 - RNA, 22 nt, synthetic construct
  source 1..22: mol_type = other RNA
  modified_base 1: mod_base = um
  modified_base 2: mod_base = OTHER; note = 2'- fluoro
  modified_base 3: mod_base = um
  modified_base 4: mod_base = um
  modified_base 5: mod_base = um
  modified_base 6: mod_base = OTHER; note = 2'- fluoro
  modified_base 7: mod_base = um
  modified_base 8: mod_base = OTHER; note = 2'- fluoro
  modified_base 9: mod_base = OTHER; note = 2'- fluoro
  modified_base 10: mod_base = cm
  modified_base 11: mod_base = OTHER; note = 2'-O- methyl
  modified_base 12: mod_base = OTHER; note = 2'-O- methyl
  modified_base 13: mod_base = gm
  modified_base 14: mod_base = OTHER; note = 2'- fluoro
  modified_base 15: mod_base = OTHER; note = 2'-O- methyl
  modified_base 16: mod_base = OTHER; note = 2'- fluoro
  modified_base 17: mod_base = um
  modified_base 18: mod_base = cm
  modified_base 19: mod_base = um
  modified_base 20: mod_base = gm
  modified_base 21: mod_base = um
  modified_base 22: mod_base = gm
  modified_base 1: mod_base = OTHER; note = Ethylene Vinyl Phosphate Modification
tttttattccaagaactctgtg

SEQ ID NO: 588 - RNA, 23 nt, synthetic construct
  source 1..23: mol_type = other RNA
  modified_base 1: mod_base = um
  modified_base 2: mod_base = OTHER; note = 2'- fluoro
  modified_base 3: mod_base = um
  modified_base 4: mod_base = um
  modified_base 5: mod_base = um
  modified_base 6: mod_base = OTHER; note = 2'- fluoro
  modified_base 7: mod_base = um
  modified_base 8: mod_base = um
  modified_base 9: mod_base = cm
  modified_base 10: mod_base = cm
  modified_base 11: mod_base = OTHER; note = 2'-O- methyl
  modified_base 12: mod_base = OTHER; note = 2'-O- methyl
  modified_base 13: mod_base = gm
  modified_base 14: mod_base = OTHER; note = 2'- fluoro
  modified_base 15: mod_base = OTHER; note = 2'-O- methyl
  modified_base 16: mod_base = OTHER; note = 2'- fluoro
  modified_base 17: mod_base = um
  modified_base 18: mod_base = cm
  modified_base 19: mod_base = um
  modified_base 20: mod_base = gm
  modified_base 21: mod_base = um
  modified_base 22: mod_base = gm
  modified_base 23: mod_base = OTHER; note = 2'-O- methyl
  modified_base 1: mod_base = OTHER; note = Ethylene Vinyl Phosphate Modification
tttttattccaagaactctgtga

SEQ ID NO: 589 - RNA, 23 nt, synthetic construct
  source 1..23: mol_type = other RNA
  modified_base 1: mod_base = um
  modified_base 2: mod_base = OTHER; note = 2'- fluoro
  modified_base 3: mod_base = um
  modified_base 4: mod_base = um
  modified_base 5: mod_base = um
  modified_base 6: mod_base = OTHER; note = 2'- fluoro
  modified_base 7: mod_base = um
  modified_base 8: mod_base = OTHER; note = 2'- fluoro
  modified_base 9: mod_base = OTHER; note = 2'- fluoro
  modified_base 10: mod_base = cm
  modified_base 11: mod_base = OTHER; note = 2'-O- methyl
  modified_base 12: mod_base = OTHER; note = 2'-O- methyl
  modified_base 13: mod_base = gm
  modified_base 14: mod_base = OTHER; note = 2'- fluoro
  modified_base 15: mod_base = OTHER; note = 2'-O- methyl
  modified_base 16: mod_base = OTHER; note = 2'- fluoro
  modified_base 17: mod_base = um
  modified_base 18: mod_base = cm
  modified_base 19: mod_base = um
  modified_base 20: mod_base = gm
  modified_base 21: mod_base = um
  modified_base 22: mod_base = gm
  modified_base 23: mod_base = OTHER; note = 2'-O- methyl
  modified_base 1: mod_base = OTHER; note = Ethylene Vinyl Phosphate Modification
tttttattccaagaactctgtga

SEQ ID NO: 590 - RNA, 19 nt, synthetic construct
  source 1..19: mol_type = other RNA
  modified_base 1: mod_base = um
  modified_base 2: mod_base = cm
  modified_base 3: mod_base = um
  modified_base 4: mod_base = um
  modified_base 5: mod_base = gm
  modified_base 6: mod_base = gm
  modified_base 7: mod_base = OTHER; note = 2'- fluoro
  modified_base 8: mod_base = OTHER; note = 2'- fluoro
  modified_base 9: mod_base = OTHER; note = 2'- fluoro
  modified_base 10: mod_base = OTHER; note = 2'-O- methyl
  modified_base 11: mod_base = OTHER; note = 2'-O- methyl
  modified_base 12: mod_base = OTHER; note = 2'-O- methyl
  modified_base 13: mod_base = OTHER; note = 2'-O- methyl
  modified_base 14: mod_base = gm
  modified_base 15: mod_base = cm
  modified_base 16: mod_base = OTHER; note = 2'-O- methyl
  modified_base 17: mod_base = OTHER; note = 2'-O- methyl
  modified_base 18: mod_base = cm
  modified_base 19: mod_base = um
  misc_binding 19: bound_moiety = L96
tcttggaataaaagcaact

SEQ ID NO: 591 - RNA, 21 nt, synthetic construct
  source 1..21: mol_type = other RNA
  modified_base 1: mod_base = OTHER; note = 2'-O- methyl
  modified_base 2: mod_base = OTHER; note = 2'- fluoro
  modified_base 3: mod_base = um
  modified_base 4: mod_base = um
  modified_base 5: mod_base = gm
  modified_base 6: mod_base = OTHER; note = 2'- fluoro
  modified_base 7: mod_base = um
  modified_base 8: mod_base = um
  modified_base 9: mod_base = um
  modified_base 10: mod_base = um
  modified_base 11: mod_base = OTHER; note = 2'-O- methyl
  modified_base 12: mod_base = um
  modified_base 13: mod_base = um
  modified_base 14: mod_base = OTHER; note = 2'- fluoro
  modified_base 15: mod_base = cm
  modified_base 16: mod_base = OTHER; note = 2'- fluoro
  modified_base 17: mod_base = OTHER; note = 2'-O- methyl
  modified_base 18: mod_base = gm
  modified_base 19: mod_base = OTHER; note = 2'-O- methyl
  modified_base 20: mod_base = OTHER; note = 2'-O- methyl
  modified_base 21: mod_base = cm
agttgcttttattccaagaac

SEQ ID NO: 592 - RNA, 19 nt, synthetic construct
  source 1..19: mol_type = other RNA
  modified_base 1: mod_base = um
  modified_base 2: mod_base = cm
  modified_base 3: mod_base = um
  modified_base 4: mod_base = um
  modified_base 5: mod_base = OTHER; note = 2'- fluoro
  modified_base 6: mod_base = gm
  modified_base 7: mod_base = OTHER; note = 2'- fluoro
  modified_base 8: mod_base = OTHER; note = 2'- fluoro
  modified_base 9: mod_base = OTHER; note = 2'- fluoro
  modified_base 10: mod_base = OTHER; note = 2'-O- methyl
  modified_base 11: mod_base = OTHER; note = 2'-O- methyl
  modified_base 12: mod_base = OTHER; note = 2'-O- methyl
  modified_base 13: mod_base = OTHER; note = 2'-O- methyl
  modified_base 14: mod_base = gm
  modified_base 15: mod_base = cm
  modified_base 16: mod_base = OTHER; note = 2'-O- methyl
  modified_base 17: mod_base = OTHER; note = 2'-O- methyl
  modified_base 18: mod_base = cm
  modified_base 19: mod_base = um
  misc_binding 19: bound_moiety = L96
tcttggaataaaagcaact

SEQ ID NO: 593 - RNA, 21 nt, synthetic construct
  source 1..21: mol_type = other RNA
  modified_base 1: mod_base = OTHER; note = 2'-O- methyl
  modified_base 2: mod_base = OTHER; note = 2'- fluoro
  modified_base 3: mod_base = um
  modified_base 4: mod_base = um
  modified_base 5: mod_base = gm
  modified_base 6: mod_base = OTHER; note = 2'- fluoro
  modified_base 7: mod_base = um
  modified_base 8: mod_base = OTHER; note = 2'- fluoro
  modified_base 9: mod_base = OTHER; note = 2'- fluoro
  modified_base 10: mod_base = um
  modified_base 11: mod_base = OTHER; note = 2'-O- methyl
  modified_base 12: mod_base = um
  modified_base 13: mod_base = um
  modified_base 14: mod_base = OTHER; note = 2'- fluoro
  modified_base 15: mod_base = cm
  modified_base 16: mod_base = OTHER; note = 2'- fluoro
  modified_base 17: mod_base = OTHER; note = 2'-O- methyl
  modified_base 18: mod_base = gm
  modified_base 19: mod_base = OTHER; note = 2'-O- methyl
  modified_base 20: mod_base = OTHER; note = 2'-O- methyl
  modified_base 21: mod_base = cm
agttgcttttattccaagaac

SEQ ID NO: 594 - RNA, 20 nt, synthetic construct
  source 1..20: mol_type = other RNA
  modified_base 1: mod_base = um
  modified_base 2: mod_base = um
  modified_base 3: mod_base = cm
  modified_base 4: mod_base = um
  modified_base 5: mod_base = um
  modified_base 6: mod_base = gm
  modified_base 7: mod_base = gm
  modified_base 8: mod_base = OTHER; note = 2'- fluoro
  modified_base 9: mod_base = OTHER; note = 2'- fluoro
  modified_base 10: mod_base = OTHER; note = 2'- fluoro
  modified_base 11: mod_base = OTHER; note = 2'-O- methyl
  modified_base 12: mod_base = OTHER; note = 2'-O- methyl
  modified_base 13: mod_base = OTHER; note = 2'-O- methyl
  modified_base 14: mod_base = OTHER; note = 2'-O- methyl
  modified_base 15: mod_base = gm
  modified_base 16: mod_base = cm
  modified_base 17: mod_base = OTHER; note = 2'-O- methyl
  modified_base 18: mod_base = OTHER; note = 2'-O- methyl
  modified_base 19: mod_base = cm
  modified_base 20: mod_base = um
  misc_binding 20: bound_moiety = L96
ttcttggaataaaagcaact

SEQ ID NO: 595 - RNA, 22 nt, synthetic construct
  source 1..22: mol_type = other RNA
  modified_base 1: mod_base = OTHER; note = 2'-O- methyl
  modified_base 2: mod_base = OTHER; note = 2'- fluoro
  modified_base 3: mod_base = um
  modified_base 4: mod_base = um
  modified_base 5: mod_base = gm
  modified_base 6: mod_base = OTHER; note = 2'- fluoro
  modified_base 7: mod_base = um
  modified_base 8: mod_base = um
  modified_base 9: mod_base = um
  modified_base 10: mod_base = um
  modified_base 11: mod_base = OTHER; note = 2'-O- methyl
  modified_base 12: mod_base = um
  modified_base 13: mod_base = um
  modified_base 14: mod_base = OTHER; note = 2'- fluoro
  modified_base 15: mod_base = cm
  modified_base 16: mod_base = OTHER; note = 2'- fluoro
  modified_base 17: mod_base = OTHER; note = 2'-O- methyl
  modified_base 18: mod_base = gm
  modified_base 19: mod_base = OTHER; note = 2'-O- methyl
  modified_base 20: mod_base = OTHER; note = 2'-O- methyl
  modified_base 21: mod_base = cm
  modified_base 22: mod_base = um
agttgcttttattccaagaact

SEQ ID NO: 596 - RNA, 20 nt, synthetic construct
  source 1..20: mol_type = other RNA
  modified_base 1: mod_base = um
  modified_base 2: mod_base = um
  modified_base 3: mod_base = cm
  modified_base 4: mod_base = um
  modified_base 5: mod_base = um
  modified_base 6: mod_base = OTHER; note = 2'- fluoro
  modified_base 7: mod_base = gm
  modified_base 8: mod_base = OTHER; note = 2'- fluoro
  modified_base 9: mod_base = OTHER; note = 2'- fluoro
  modified_base 10: mod_base = OTHER; note = 2'- fluoro
  modified_base 11: mod_base = OTHER; note = 2'-O- methyl
  modified_base 12: mod_base = OTHER; note = 2'-O- methyl
  modified_base 13: mod_base = OTHER; note = 2'-O- methyl
  modified_base 14: mod_base = OTHER; note = 2'-O- methyl
  modified_base 15: mod_base = gm
  modified_base 16: mod_base = cm
  modified_base 17: mod_base = OTHER; note = 2'-O- methyl
  modified_base 18: mod_base = OTHER; note = 2'-O- methyl
  modified_base 19: mod_base = cm
  modified_base 20: mod_base = um
  misc_binding 20: bound_moiety = L96
ttcttggaataaaagcaact

SEQ ID NO: 597 - RNA, 22 nt, synthetic construct
  source 1..22: mol_type = other RNA
  modified_base 1: mod_base = OTHER; note = 2'-O- methyl
  modified_base 2: mod_base = OTHER; note = 2'- fluoro
  modified_base 3: mod_base = um
  modified_base 4: mod_base = um
  modified_base 5: mod_base = gm
  modified_base 6: mod_base = OTHER; note = 2'- fluoro
  modified_base 7: mod_base = um
  modified_base 8: mod_base = OTHER; note = 2'- fluoro
  modified_base 9: mod_base = OTHER; note = 2'- fluoro
  modified_base 10: mod_base = um
  modified_base 11: mod_base = OTHER; note = 2'-O- methyl
  modified_base 12: mod_base = um
  modified_base 13: mod_base = um
  modified_base 14: mod_base = OTHER; note = 2'- fluoro
  modified_base 15: mod_base = cm
  modified_base 16: mod_base = OTHER; note = 2'- fluoro
  modified_base 17: mod_base = OTHER; note = 2'-O- methyl
  modified_base 18: mod_base = gm
  modified_base 19: mod_base = OTHER; note = 2'-O- methyl
  modified_base 20: mod_base = OTHER; note = 2'-O- methyl
  modified_base 21: mod_base = cm
  modified_base 22: mod_base = um
agttgcttttattccaagaact

SEQ ID NO: 598 - RNA, 21 nt, synthetic construct
  source 1..21: mol_type = other RNA
  modified_base 1: mod_base = gm
  modified_base 2: mod_base = um
  modified_base 3: mod_base = um
  modified_base 4: mod_base = cm
  modified_base 5: mod_base = um
  modified_base 6: mod_base = um
  modified_base 7: mod_base = gm
  modified_base 8: mod_base = gm
  modified_base 9: mod_base = OTHER; note = 2'- fluoro
  modified_base 10: mod_base = OTHER; note = 2'- fluoro
  modified_base 11: mod_base = OTHER; note = 2'- fluoro
  modified_base 12: mod_base = OTHER; note = 2'-O- methyl
  modified_base 13: mod_base = OTHER; note = 2'-O- methyl
  modified_base 14: mod_base = OTHER; note = 2'-O- methyl
  modified_base 15: mod_base = OTHER; note = 2'-O- methyl
  modified_base 16: mod_base = gm
  modified_base 17: mod_base = cm
  modified_base 18: mod_base = OTHER; note = 2'-O- methyl
  modified_base 19: mod_base = OTHER; note = 2'-O- methyl
  modified_base 20: mod_base = cm
  modified_base 21: mod_base = um
  misc_binding 21: bound_moiety = L96
gttcttggaataaaagcaact

SEQ ID NO: 599 - RNA, 21 nt, synthetic construct
  source 1..21: mol_type = other RNA
  modified_base 1: mod_base = OTHER; note = 2'-O- methyl
  modified_base 2: mod_base = OTHER; note = 2'- fluoro
  modified_base 3: mod_base = um
  modified_base 4: mod_base = um
  modified_base 5: mod_base = gm
  modified_base 6: mod_base = OTHER; note = 2'- fluoro
  modified_base 7: mod_base = um
  modified_base 8: mod_base = um
  modified_base 9: mod_base = um
  modified_base 10: mod_base = um
  modified_base 11: mod_base = OTHER; note = 2'-O- methyl
  modified_base 12: mod_base = um
  modified_base 13: mod_base = um
  modified_base 14: mod_base = OTHER; note = 2'- fluoro
  modified_base 15: mod_base = cm
  modified_base 16: mod_base = OTHER; note = 2'- fluoro
  modified_base 17: mod_base = OTHER; note = 2'-O- methyl
  modified_base 18: mod_base = gm
  modified_base 19: mod_base = OTHER; note = 2'-O- methyl
  modified_base 20: mod_base = OTHER; note = 2'-O- methyl
  modified_base 21: mod_base = cm
  modified_base 1: mod_base = OTHER; note = Ethylene Vinyl Phosphate Modification
agttgcttttattccaagaac

SEQ ID NO: 600 - RNA, 21 nt, synthetic construct
  source 1..21: mol_type = other RNA
  modified_base 1: mod_base = OTHER; note = 2'-O- methyl
  modified_base 2: mod_base = OTHER; note = 2'- fluoro
  modified_base 3: mod_base = um
  modified_base 4: mod_base = um
  modified_base 5: mod_base = gm
  modified_base 6: mod_base = OTHER; note = 2'- fluoro
  modified_base 7: mod_base = um
  modified_base 8: mod_base = OTHER; note = 2'- fluoro
  modified_base 9: mod_base = OTHER; note = 2'- fluoro
  modified_base 10: mod_base = um
  modified_base 11: mod_base = OTHER; note = 2'-O- methyl
  modified_base 12: mod_base = um
  modified_base 13: mod_base = um
  modified_base 14: mod_base = OTHER; note = 2'- fluoro
  modified_base 15: mod_base = cm
  modified_base 16: mod_base = OTHER; note = 2'- fluoro
  modified_base 17: mod_base = OTHER; note = 2'-O- methyl
  modified_base 18: mod_base = gm
  modified_base 19: mod_base = OTHER; note = 2'-O- methyl
  modified_base 20: mod_base = OTHER; note = 2'-O- methyl
  modified_base 21: mod_base = cm
  modified_base 1: mod_base = OTHER; note = Ethylene Vinyl Phosphate Modification
agttgcttttattccaagaac

SEQ ID NO: 601 - RNA, 22 nt, synthetic construct
  source 1..22: mol_type = other RNA
  modified_base 1: mod_base = OTHER; note = 2'-O- methyl
  modified_base 2: mod_base = OTHER; note = 2'- fluoro
  modified_base 3: mod_base = um
  modified_base 4: mod_base = um
  modified_base 5: mod_base = gm
  modified_base 6: mod_base = OTHER; note = 2'- fluoro
  modified_base 7: mod_base = um
  modified_base 8: mod_base = um
  modified_base 9: mod_base = um
  modified_base 10: mod_base = um
  modified_base 11: mod_base = OTHER; note = 2'-O- methyl
  modified_base 12: mod_base = um
  modified_base 13: mod_base = um
  modified_base 14: mod_base = OTHER; note = 2'- fluoro
  modified_base 15: mod_base = cm
  modified_base 16: mod_base = OTHER; note = 2'- fluoro
  modified_base 17: mod_base = OTHER; note = 2'-O- methyl
  modified_base 18: mod_base = gm
  modified_base 19: mod_base = OTHER; note = 2'-O- methyl
  modified_base 20: mod_base = OTHER; note = 2'-O- methyl
  modified_base 21: mod_base = cm
  modified_base 22: mod_base = um
  modified_base 1: mod_base = OTHER; note = Ethylene Vinyl Phosphate Modification
agttgcttttattccaagaact

SEQ ID NO: 602 - RNA, 22 nt, synthetic construct
  source 1..22: mol_type = other RNA
  modified_base 1: mod_base = OTHER; note = 2'-O- methyl
  modified_base 2: mod_base = OTHER; note = 2'- fluoro
  modified_base 3: mod_base = um
  modified_base 4: mod_base = um
  modified_base 5: mod_base = gm
  modified_base 6: mod_base = OTHER; note = 2'- fluoro
  modified_base 7: mod_base = um
  modified_base 8: mod_base = OTHER; note = 2'- fluoro
  modified_base 9: mod_base = OTHER; note = 2'- fluoro
  modified_base 10: mod_base = um
  modified_base 11: mod_base = OTHER; note = 2'-O- methyl
  modified_base 12: mod_base = um
  modified_base 13: mod_base = um
  modified_base 14: mod_base = OTHER; note = 2'- fluoro
  modified_base 15: mod_base = cm
  modified_base 16: mod_base = OTHER; note = 2'- fluoro
  modified_base 17: mod_base = OTHER; note = 2'-O- methyl
  modified_base 18: mod_base = gm
  modified_base 19: mod_base = OTHER; note = 2'-O- methyl
  modified_base 20: mod_base = OTHER; note = 2'-O- methyl
  modified_base 21: mod_base = cm
  modified_base 22: mod_base = um
  modified_base 1: mod_base = OTHER; note = Ethylene Vinyl Phosphate Modification
agttgcttttattccaagaact

SEQ ID NO: 603 - RNA, 23 nt, synthetic construct
  source 1..23: mol_type = other RNA
  modified_base 1: mod_base = OTHER; note = 2'-O- methyl
  modified_base 2: mod_base = OTHER; note = 2'- fluoro
  modified_base 3: mod_base = um
  modified_base 4: mod_base = um
  modified_base 5: mod_base = gm
  modified_base 6: mod_base = OTHER; note = 2'- fluoro
  modified_base 7: mod_base = um
  modified_base 8: mod_base = um
  modified_base 9: mod_base = um
  modified_base 10: mod_base = um
  modified_base 11: mod_base = OTHER; note = 2'-O- methyl
  modified_base 12: mod_base = um
  modified_base 13: mod_base = um
  modified_base 14: mod_base = OTHER; note = 2'- fluoro
  modified_base 15: mod_base = cm
  modified_base 16: mod_base = OTHER; note = 2'- fluoro
  modified_base 17: mod_base = OTHER; note = 2'-O- methyl
  modified_base 18: mod_base = gm
  modified_base 19: mod_base = OTHER; note = 2'-O- methyl
  modified_base 20: mod_base = OTHER; note = 2'-O- methyl
  modified_base 21: mod_base = cm
  modified_base 22: mod_base = um
  modified_base 23: mod_base = cm
  modified_base 1: mod_base = OTHER; note = Ethylene Vinyl Phosphate Modification
agttgcttttattccaagaactc

SEQ ID NO: 604 - RNA, 23 nt, synthetic construct
  source 1..23: mol_type = other RNA
  modified_base 1: mod_base = OTHER; note = 2'-O- methyl
  modified_base 2: mod_base = OTHER; note = 2'- fluoro
  modified_base 3: mod_base = um
  modified_base 4: mod_base = um
  modified_base 5: mod_base = gm
  modified_base 6: mod_base = OTHER; note = 2'- fluoro
  modified_base 7: mod_base = um
  modified_base 8: mod_base = OTHER; note = 2'- fluoro
  modified_base 9: mod_base = OTHER; note = 2'- fluoro
  modified_base 10: mod_base = um
  modified_base 11: mod_base = OTHER; note = 2'-O- methyl
  modified_base 12: mod_base = um
  modified_base 13: mod_base = um
  modified_base 14: mod_base = OTHER; note = 2'- fluoro
  modified_base 15: mod_base = cm
  modified_base 16: mod_base = OTHER; note = 2'- fluoro
  modified_base 17: mod_base = OTHER; note = 2'-O- methyl
  modified_base 18: mod_base = gm
  modified_base 19: mod_base = OTHER; note = 2'-O- methyl
  modified_base 20: mod_base = OTHER; note = 2'-O- methyl
  modified_base 21: mod_base = cm
  modified_base 22: mod_base = um
  modified_base 23: mod_base = cm
  modified_base 1: mod_base = OTHER; note = Ethylene Vinyl Phosphate Modification
agttgcttttattccaagaactc

SEQ ID NO: 605 - RNA, 19 nt, synthetic construct
  source 1..19: mol_type = other RNA
  modified_base 1: mod_base = cm
  modified_base 2: mod_base = um
  modified_base 3: mod_base = um
  modified_base 4: mod_base = gm
  modified_base 5: mod_base = gm
  modified_base 6: mod_base = OTHER; note = 2'-O- methyl
  modified_base 7: mod_base = OTHER; note = 2'- fluoro
  modified_base 8: mod_base = OTHER; note = 2'- fluoro
  modified_base 9: mod_base = OTHER; note = 2'- fluoro
  modified_base 10: mod_base = OTHER; note = 2'-O- methyl
  modified_base 11: mod_base = OTHER; note = 2'-O- methyl
  modified_base 12: mod_base = OTHER; note = 2'-O- methyl
  modified_base 13: mod_base = gm
  modified_base 14: mod_base = cm
  modified_base 15: mod_base = OTHER; note = 2'-O- methyl
  modified_base 16: mod_base = OTHER; note = 2'-O- methyl
  modified_base 17: mod_base = cm
  modified_base 18: mod_base = cm
  modified_base 19: mod_base = um
  misc_binding 19: bound_moiety = L96
cttggaataaaagcaacct

SEQ ID NO: 606 - RNA, 21 nt, synthetic construct
  source 1..21: mol_type = other RNA
  modified_base 1: mod_base = OTHER; note = 2'-O- methyl
  modified_base 2: mod_base = OTHER; note = 2'- fluoro
  modified_base 3: mod_base = gm
  modified_base 4: mod_base = um
  modified_base 5: mod_base = um
  modified_base 6: mod_base = OTHER; note = 2'- fluoro
  modified_base 7: mod_base = cm
  modified_base 8: mod_base = um
  modified_base 9: mod_base = um
  modified_base 10: mod_base = um
  modified_base 11: mod_base = um
  modified_base 12: mod_base = OTHER; note = 2'-O- methyl
  modified_base 13: mod_base = um
  modified_base 14: mod_base = OTHER; note = 2'- fluoro
  modified_base 15: mod_base = cm
  modified_base 16: mod_base = OTHER; note = 2'- fluoro
  modified_base 17: mod_base = OTHER; note = 2'-O- methyl
  modified_base 18: mod_base = OTHER; note = 2'-O- methyl
  modified_base 19: mod_base = gm
  modified_base 20: mod_base = OTHER; note = 2'-O- methyl
  modified_base 21: mod_base = OTHER; note = 2'-O- methyl
aggttgcttttattccaagaa

SEQ ID NO: 607 - RNA, 19 nt, synthetic construct
  source 1..19: mol_type = other RNA
  modified_base 1: mod_base = cm
  modified_base 2: mod_base = um
  modified_base 3: mod_base = um
  modified_base 4: mod_base = gm
  modified_base 5: mod_base = OTHER; note = 2'- fluoro
  modified_base 6: mod_base = OTHER; note = 2'-O- methyl
  modified_base 7: mod_base = OTHER; note = 2'- fluoro
  modified_base 8: mod_base = OTHER; note = 2'- fluoro
  modified_base 9: mod_base = OTHER; note = 2'- fluoro
  modified_base 10: mod_base = OTHER; note = 2'-O- methyl
  modified_base 11: mod_base = OTHER; note = 2'-O- methyl
  modified_base 12: mod_base = OTHER; note = 2'-O- methyl
  modified_base 13: mod_base = gm
  modified_base 14: mod_base = cm
  modified_base 15: mod_base = OTHER; note = 2'-O- methyl
  modified_base 16: mod_base = OTHER; note = 2'-O- methyl
  modified_base 17: mod_base = cm
  modified_base 18: mod_base = cm
  modified_base 19: mod_base = um
  misc_binding 19: bound_moiety = L96
cttggaataaaagcaacct

SEQ ID NO: 608 - RNA, 21 nt, synthetic construct
  source 1..21: mol_type = other RNA
  modified_base 1: mod_base = OTHER; note = 2'-O- methyl
  modified_base 2: mod_base = OTHER; note = 2'- fluoro
  modified_base 3: mod_base = gm
  modified_base 4: mod_base = um
  modified_base 5: mod_base = um
  modified_base 6: mod_base = OTHER; note = 2'- fluoro
  modified_base 7: mod_base = cm
  modified_base 8: mod_base = OTHER; note = 2'- fluoro
  modified_base 9: mod_base = OTHER; note = 2'- fluoro
  modified_base 10: mod_base = um
  modified_base 11: mod_base = um
  modified_base 12: mod_base = OTHER; note = 2'-O- methyl
  modified_base 13: mod_base = um
  modified_base 14: mod_base = OTHER; note = 2'- fluoro
  modified_base 15: mod_base = cm
  modified_base 16: mod_base = OTHER; note = 2'- fluoro
  modified_base 17: mod_base = OTHER; note = 2'-O- methyl
  modified_base 18: mod_base = OTHER; note = 2'-O- methyl
  modified_base 19: mod_base = gm
  modified_base 20: mod_base = OTHER; note = 2'-O- methyl
  modified_base 21: mod_base = OTHER; note = 2'-O- methyl
aggttgcttttattccaagaa

SEQ ID NO: 609 - RNA, 20 nt, synthetic construct
  source 1..20: mol_type = other RNA
  modified_base 1: mod_base = um
  modified_base 2: mod_base = cm
  modified_base 3: mod_base = um
  modified_base 4: mod_base = um
  modified_base 5: mod_base = gm
  modified_base 6: mod_base = gm
  modified_base 7: mod_base = OTHER; note = 2'-O- methyl
  modified_base 8: mod_base = OTHER; note = 2'- fluoro
  modified_base 9: mod_base = OTHER; note = 2'- fluoro
  modified_base 10: mod_base = OTHER; note = 2'- fluoro
  modified_base 11: mod_base = OTHER; note = 2'-O- methyl
  modified_base 12: mod_base = OTHER; note = 2'-O- methyl
  modified_base 13: mod_base = OTHER; note = 2'-O- methyl
  modified_base 14: mod_base = gm
  modified_base 15: mod_base = cm
  modified_base 16: mod_base = OTHER; note = 2'-O- methyl
  modified_base 17: mod_base = OTHER; note = 2'-O- methyl
  modified_base 18: mod_base = cm
  modified_base 19: mod_base = cm
  modified_base 20: mod_base = um
  misc_binding 20: bound_moiety = L96
tcttggaataaaagcaacct

SEQ ID NO: 610 - RNA, 22 nt, synthetic construct
  source 1..22: mol_type = other RNA
  modified_base 1: mod_base = OTHER; note = 2'-O- methyl
  modified_base 2: mod_base = OTHER; note = 2'- fluoro
  modified_base 3: mod_base = gm
  modified_base 4: mod_base = um
  modified_base 5: mod_base = um
  modified_base 6: mod_base = OTHER; note = 2'- fluoro
  modified_base 7: mod_base = cm
  modified_base 8: mod_base = um
  modified_base 9: mod_base = um
  modified_base 10: mod_base = um
  modified_base 11: mod_base = um
  modified_base 12: mod_base = OTHER; note = 2'-O- methyl
  modified_base 13: mod_base = um
  modified_base 14: mod_base = OTHER; note = 2'- fluoro
  modified_base 15: mod_base = cm
  modified_base 16: mod_base = OTHER; note = 2'- fluoro
  modified_base 17: mod_base = OTHER; note = 2'-O- methyl
  modified_base 18: mod_base = OTHER; note = 2'-O- methyl
  modified_base 19: mod_base = gm
  modified_base 20: mod_base = OTHER; note = 2'-O- methyl
  modified_base 21: mod_base = OTHER; note = 2'-O- methyl
  modified_base 22: mod_base = cm
aggttgcttttattccaagaac

SEQ ID NO: 611 - RNA, 20 nt, synthetic construct
  source 1..20: mol_type = other RNA
  modified_base 1: mod_base = um
  modified_base 2: mod_base = cm
  modified_base 3: mod_base = um
  modified_base 4: mod_base = um
  modified_base 5: mod_base = gm
  modified_base 6: mod_base = OTHER; note = 2'- fluoro
  modified_base 7: mod_base = OTHER; note = 2'-O- methyl
  modified_base 8: mod_base = OTHER; note = 2'- fluoro
  modified_base 9: mod_base = OTHER; note = 2'- fluoro
  modified_base 10: mod_base = OTHER; note = 2'- fluoro
  modified_base 11: mod_base = OTHER; note = 2'-O- methyl
  modified_base 12: mod_base = OTHER; note = 2'-O- methyl
  modified_base 13: mod_base = OTHER; note = 2'-O- methyl
  modified_base 14: mod_base = gm
  modified_base 15: mod_base = cm
  modified_base 16: mod_base = OTHER; note = 2'-O- methyl
  modified_base 17: mod_base = OTHER; note = 2'-O- methyl
  modified_base 18: mod_base = cm
  modified_base 19: mod_base = cm
  modified_base 20: mod_base = um
  misc_binding 20: bound_moiety = L96
tcttggaataaaagcaacct

SEQ ID NO: 612 - RNA, 22 nt, synthetic construct
  source 1..22: mol_type = other RNA
  modified_base 1: mod_base = OTHER; note = 2'-O- methyl
  modified_base 2: mod_base = OTHER; note = 2'- fluoro
  modified_base 3: mod_base = gm
  modified_base 4: mod_base = um
  modified_base 5: mod_base = um
  modified_base 6: mod_base = OTHER; note = 2'- fluoro
  modified_base 7: mod_base = cm
  modified_base 8: mod_base = OTHER; note = 2'- fluoro
  modified_base 9: mod_base = OTHER; note = 2'- fluoro
  modified_base 10: mod_base = um
  modified_base 11: mod_base = um
  modified_base 12: mod_base = OTHER; note = 2'-O- methyl
  modified_base 13: mod_base = um
  modified_base 14: mod_base = OTHER; note = 2'- fluoro
  modified_base 15: mod_base = cm
  modified_base 16: mod_base = OTHER; note = 2'- fluoro
  modified_base 17: mod_base = OTHER; note = 2'-O- methyl
  modified_base 18: mod_base = OTHER; note = 2'-O- methyl
  modified_base 19: mod_base = gm
  modified_base 20: mod_base = OTHER; note = 2'-O- methyl
  modified_base 21: mod_base = OTHER; note = 2'-O- methyl
  modified_base 22: mod_base = cm
aggttgcttttattccaagaac

SEQ ID NO: 613 - RNA, 21 nt, synthetic construct
  source 1..21: mol_type = other RNA
  modified_base 1: mod_base = um
  modified_base 2: mod_base = um
  modified_base 3: mod_base = cm
  modified_base 4: mod_base = um
  modified_base 5: mod_base = um
  modified_base 6: mod_base = gm
  modified_base 7: mod_base = gm
  modified_base 8: mod_base = OTHER; note = 2'-O- methyl
  modified_base 9: mod_base = OTHER; note = 2'- fluoro
  modified_base 10: mod_base = OTHER; note = 2'- fluoro
  modified_base 11: mod_base = OTHER; note = 2'- fluoro
  modified_base 12: mod_base = OTHER; note = 2'-O- methyl
  modified_base 13: mod_base = OTHER; note = 2'-O- methyl
  modified_base 14: mod_base = OTHER; note = 2'-O- methyl
  modified_base 15: mod_base = gm
  modified_base 16: mod_base = cm
  modified_base 17: mod_base = OTHER; note = 2'-O- methyl
  modified_base 18: mod_base = OTHER; note = 2'-O- methyl
  modified_base 19: mod_base = cm
  modified_base 20: mod_base = cm
  modified_base 21: mod_base = um
  misc_binding 21: bound_moiety = L96
ttcttggaataaaagcaacct

SEQ ID NO: 614 - RNA, 23 nt, synthetic construct
  source 1..23: mol_type = other RNA
  modified_base 1: mod_base = OTHER; note = 2'-O- methyl
  modified_base 2: mod_base = OTHER; note = 2'- fluoro
  modified_base 3: mod_base = gm
  modified_base 4: mod_base = um
  modified_base 5: mod_base = um
  modified_base 6: mod_base = OTHER; note = 2'- fluoro
  modified_base 7: mod_base = cm
  modified_base 8: mod_base = um
  modified_base 9: mod_base = um
  modified_base 10: mod_base = um
  modified_base 11: mod_base = um
  modified_base 12: mod_base = OTHER; note = 2'-O- methyl
  modified_base 13: mod_base = um
  modified_base 14: mod_base = OTHER; note = 2'- fluoro
  modified_base 15: mod_base = cm
  modified_base 16: mod_base = OTHER; note = 2'- fluoro
  modified_base 17: mod_base = OTHER; note = 2'-O- methyl
  modified_base 18: mod_base = OTHER; note = 2'-O- methyl
  modified_base 19: mod_base = gm
  modified_base 20: mod_base = OTHER; note = 2'-O- methyl
  modified_base 21: mod_base = OTHER; note = 2'-O- methyl
  modified_base 22: mod_base = cm
  modified_base 23: mod_base = um
aggttgcttttattccaagaact

SEQ ID NO: 615 - RNA, 21 nt, synthetic construct
  source 1..21: mol_type = other RNA
  modified_base 1: mod_base = um
  modified_base 2: mod_base = um
  modified_base 3: mod_base = cm
  modified_base 4: mod_base = um
  modified_base 5: mod_base = um
  modified_base 6: mod_base = gm
  modified_base 7: mod_base = OTHER; note = 2'- fluoro
  modified_base 8: mod_base = OTHER; note = 2'-O- methyl
  modified_base 9: mod_base = OTHER; note = 2'- fluoro
  modified_base 10: mod_base = OTHER; note = 2'- fluoro
  modified_base 11: mod_base = OTHER; note = 2'- fluoro
  modified_base 12: mod_base = OTHER; note = 2'-O- methyl
  modified_base 13: mod_base = OTHER; note = 2'-O- methyl
  modified_base 14: mod_base = OTHER; note = 2'-O- methyl
  modified_base 15: mod_base = gm
  modified_base 16: mod_base = cm
  modified_base 17: mod_base = OTHER; note = 2'-O- methyl
  modified_base 18: mod_base = OTHER; note = 2'-O- methyl
  modified_base 19: mod_base = cm
  modified_base 20: mod_base = cm
  modified_base 21: mod_base = um
  misc_binding 21: bound_moiety = L96
ttcttggaataaaagcaacct

SEQ ID NO: 616 - RNA, 23 nt, synthetic construct
  source 1..23: mol_type = other RNA
  modified_base 1: mod_base = OTHER; note = 2'-O- methyl
  modified_base 2: mod_base = OTHER; note = 2'- fluoro
  modified_base 3: mod_base = gm
  modified_base 4: mod_base = um
  modified_base 5: mod_base = um
  modified_base 6: mod_base = OTHER; note = 2'- fluoro
  modified_base 7: mod_base = cm
  modified_base 8: mod_base = OTHER; note = 2'- fluoro
  modified_base 9: mod_base = OTHER; note = 2'- fluoro
  modified_base 10: mod_base = um
  modified_base 11: mod_base = um
  modified_base 12: mod_base = OTHER; note = 2'-O- methyl
  modified_base 13: mod_base = um
  modified_base 14: mod_base = OTHER; note = 2'- fluoro
  modified_base 15: mod_base = cm
  modified_base 16: mod_base = OTHER; note = 2'- fluoro
  modified_base 17: mod_base = OTHER; note = 2'-O- methyl
  modified_base 18: mod_base = OTHER; note = 2'-O- methyl
  modified_base 19: mod_base = gm
  modified_base 20: mod_base = OTHER; note = 2'-O- methyl
  modified_base 21: mod_base = OTHER; note = 2'-O- methyl
  modified_base 22: mod_base = cm
  modified_base 23: mod_base = um
aggttgcttttattccaagaact

SEQ ID NO: 617 - RNA, 21 nt, synthetic construct
  source 1..21: mol_type = other RNA
  modified_base 1: mod_base = OTHER; note = 2'-O- methyl
  modified_base 2: mod_base = OTHER; note = 2'- fluoro
  modified_base 3: mod_base = gm
  modified_base 4: mod_base = um
  modified_base 5: mod_base = um
  modified_base 6: mod_base = OTHER; note = 2'- fluoro
  modified_base 7: mod_base = cm
  modified_base 8: mod_base = um
  modified_base 9: mod_base = um
  modified_base 10: mod_base = um
  modified_base 11: mod_base = um
  modified_base 12: mod_base = OTHER; note = 2'-O- methyl
  modified_base 13: mod_base = um
  modified_base 14: mod_base = OTHER; note = 2'- fluoro
  modified_base 15: mod_base = cm
  modified_base 16: mod_base = OTHER; note = 2'- fluoro
  modified_base 17: mod_base = OTHER; note = 2'-O- methyl
  modified_base 18: mod_base = OTHER; note = 2'-O- methyl
  modified_base 19: mod_base = gm
  modified_base 20: mod_base = OTHER; note = 2'-O- methyl
  modified_base 21: mod_base = OTHER; note = 2'-O- methyl
  modified_base 1: mod_base = OTHER; note = Ethylene Vinyl Phosphate Modification
aggttgcttttattccaagaa

SEQ ID NO: 618 - RNA, 21 nt, synthetic construct
  source 1..21: mol_type = other RNA
  modified_base 1: mod_base = OTHER; note = 2'-O- methyl
  modified_base 2: mod_base = OTHER; note = 2'- fluoro
  modified_base 3: mod_base = gm
  modified_base 4: mod_base = um
  modified_base 5: mod_base = um
  modified_base 6: mod_base = OTHER; note = 2'- fluoro
  modified_base 7: mod_base = cm
  modified_base 8: mod_base = OTHER; note = 2'- fluoro
  modified_base 9: mod_base = OTHER; note = 2'- fluoro
  modified_base 10: mod_base = um
  modified_base 11: mod_base = um
  modified_base 12: mod_base = OTHER; note = 2'-O- methyl
  modified_base 13: mod_base = um
  modified_base 14: mod_base = OTHER; note = 2'- fluoro
  modified_base 15: mod_base = cm
  modified_base 16: mod_base = OTHER; note = 2'- fluoro
  modified_base 17: mod_base = OTHER; note = 2'-O- methyl
  modified_base 18: mod_base = OTHER; note = 2'-O- methyl
  modified_base 19: mod_base = gm
  modified_base 20: mod_base = OTHER; note = 2'-O- methyl
  modified_base 21: mod_base = OTHER; note = 2'-O- methyl
  modified_base 1: mod_base = OTHER; note = Ethylene Vinyl Phosphate Modification
aggttgcttttattccaagaa

SEQ ID NO: 619 - RNA, 22 nt, synthetic construct
  source 1..22: mol_type = other RNA
  modified_base 1: mod_base = OTHER; note = 2'-O- methyl
  modified_base 2: mod_base = OTHER; note = 2'- fluoro
  modified_base 3: mod_base = gm
  modified_base 4: mod_base = um
  modified_base 5: mod_base = um
  modified_base 6: mod_base = OTHER; note = 2'- fluoro
  modified_base 7: mod_base = cm
  modified_base 8: mod_base = um
  modified_base 9: mod_base = um
  modified_base 10: mod_base = um
  modified_base 11: mod_base = um
  modified_base 12: mod_base = OTHER; note = 2'-O- methyl
  modified_base 13: mod_base = um
  modified_base 14: mod_base = OTHER; note = 2'- fluoro
  modified_base 15: mod_base = cm
  modified_base 16: mod_base = OTHER; note = 2'- fluoro
  modified_base 17: mod_base = OTHER; note = 2'-O- methyl
  modified_base 18: mod_base = OTHER; note = 2'-O- methyl
  modified_base 19: mod_base = gm
  modified_base 20: mod_base = OTHER; note = 2'-O- methyl
  modified_base 21: mod_base = OTHER; note = 2'-O- methyl
  modified_base 22: mod_base = cm
  modified_base 1: mod_base = OTHER; note = Ethylene Vinyl Phosphate Modification
aggttgcttttattccaagaac

SEQ ID NO: 620 - RNA, 22 nt, synthetic construct
  source 1..22: mol_type = other RNA
  modified_base 1: mod_base = OTHER; note = 2'-O- methyl
  modified_base 2: mod_base = OTHER; note = 2'- fluoro
  modified_base 3: mod_base = gm
  modified_base 4: mod_base = um
  modified_base 5: mod_base = um
  modified_base 6: mod_base = OTHER; note = 2'- fluoro
  modified_base 7: mod_base = cm
  modified_base 8: mod_base = OTHER; note = 2'- fluoro
  modified_base 9: mod_base = OTHER; note = 2'- fluoro
  modified_base 10: mod_base = um
  modified_base 11: mod_base = um
  modified_base 12: mod_base = OTHER; note = 2'-O- methyl
  modified_base 13: mod_base = um
  modified_base 14: mod_base = OTHER; note = 2'- fluoro
  modified_base 15: mod_base = cm
  modified_base 16: mod_base = OTHER; note = 2'- fluoro
  modified_base 17: mod_base = OTHER; note = 2'-O- methyl
  modified_base 18: mod_base = OTHER; note = 2'-O- methyl
  modified_base 19: mod_base = gm
  modified_base 20: mod_base = OTHER; note = 2'-O- methyl
  modified_base 21: mod_base = OTHER; note = 2'-O- methyl
  modified_base 22: mod_base = cm
  modified_base 1: mod_base = OTHER; note = Ethylene Vinyl Phosphate Modification
aggttgcttttattccaagaac

SEQ ID NO: 621 - RNA, 23 nt, synthetic construct
  source 1..23: mol_type = other RNA
  modified_base 1: mod_base = OTHER; note = 2'-O- methyl
  modified_base 2: mod_base = OTHER; note = 2'- fluoro
  modified_base 3: mod_base = gm
  modified_base 4: mod_base = um
  modified_base 5: mod_base = um
  modified_base 6: mod_base = OTHER; note = 2'- fluoro
  modified_base 7: mod_base = cm
  modified_base 8: mod_base = um
  modified_base 9: mod_base = um
  modified_base 10: mod_base = um
  modified_base 11: mod_base = um
  modified_base 12: mod_base = OTHER; note = 2'-O- methyl
  modified_base 13: mod_base = um
  modified_base 14: mod_base = OTHER; note = 2'- fluoro
  modified_base 15: mod_base = cm
  modified_base 16: mod_base = OTHER; note = 2'- fluoro
  modified_base 17: mod_base = OTHER; note = 2'-O- methyl
  modified_base 18: mod_base = OTHER; note = 2'-O- methyl
  modified_base 19: mod_base = gm
  modified_base 20: mod_base = OTHER; note = 2'-O- methyl
  modified_base 21: mod_base = OTHER; note = 2'-O- methyl
  modified_base 22: mod_base = cm
  modified_base 23: mod_base = um
  modified_base 1: mod_base = OTHER; note = Ethylene Vinyl Phosphate Modification
aggttgcttttattccaagaact

SEQ ID NO: 622 - RNA, 23 nt, synthetic construct
  source 1..23: mol_type = other RNA
  modified_base 1: mod_base = OTHER; note = 2'-O- methyl
  modified_base 2: mod_base = OTHER; note = 2'- fluoro
  modified_base 3: mod_base = gm
  modified_base 4: mod_base = um
  modified_base 5: mod_base = um
  modified_base 6: mod_base = OTHER; note = 2'- fluoro
  modified_base 7: mod_base = cm
  modified_base 8: mod_base = OTHER; note = 2'- fluoro
  modified_base 9: mod_base = OTHER; note = 2'- fluoro
  modified_base 10: mod_base = um
  modified_base 11: mod_base = um
  modified_base 12: mod_base = OTHER; note = 2'-O- methyl
  modified_base 13: mod_base = um
  modified_base 14: mod_base = OTHER; note = 2'- fluoro
  modified_base 15: mod_base = cm
  modified_base 16: mod_base = OTHER; note = 2'- fluoro
  modified_base 17: mod_base = OTHER; note = 2'-O- methyl
  modified_base 18: mod_base = OTHER; note = 2'-O- methyl
  modified_base 19: mod_base = gm
  modified_base 20: mod_base = OTHER; note = 2'-O- methyl
  modified_base 21: mod_base = OTHER; note = 2'-O- methyl
  modified_base 22: mod_base = cm
  modified_base 23: mod_base = um
  modified_base 1: mod_base = OTHER; note = Ethylene Vinyl Phosphate Modification
aggttgcttttattccaagaact

SEQ ID NO: 623 - RNA, 19 nt, synthetic construct
  source 1..19: mol_type = other RNA
  modified_base 1: mod_base = um
  modified_base 2: mod_base = um
  modified_base 3: mod_base = gm
  modified_base 4: mod_base = gm
  modified_base 5: mod_base = OTHER; note = 2'-O- methyl
  modified_base 6: mod_base = OTHER; note = 2'-O- methyl
  modified_base 7: mod_base = OTHER; note = 2'- fluoro
  modified_base 8: mod_base = OTHER; note = 2'- fluoro
  modified_base 9: mod_base = OTHER; note = 2'- fluoro
  modified_base 10: mod_base = OTHER; note = 2'-O- methyl
  modified_base 11: mod_base = OTHER; note = 2'-O- methyl
  modified_base 12: mod_base = gm
  modified_base 13: mod_base = cm
  modified_base 14: mod_base = OTHER; note = 2'-O- methyl
  modified_base 15: mod_base = OTHER; note = 2'-O- methyl
  modified_base 16: mod_base = cm
  modified_base 17: mod_base = cm
  modified_base 18: mod_base = um
  modified_base 19: mod_base = um
  misc_binding 19: bound_moiety = L96
ttggaataaaagcaacctt

SEQ ID NO: 624 - RNA, 21 nt, synthetic construct
  source 1..21: mol_type = other RNA
  modified_base 1: mod_base = OTHER; note = 2'-O- methyl
  modified_base 2: mod_base = OTHER; note = 2'- fluoro
  modified_base 3: mod_base = gm
  modified_base 4: mod_base = gm
  modified_base 5: mod_base = um
  modified_base 6: mod_base = OTHER; note = 2'- fluoro
  modified_base 7: mod_base = gm
  modified_base 8: mod_base = cm
  modified_base 9: mod_base = um
  modified_base 10: mod_base = um
  modified_base 11: mod_base = um
  modified_base 12: mod_base = um
  modified_base 13: mod_base = OTHER; note = 2'-O- methyl
  modified_base 14: mod_base = OTHER; note = 2'- fluoro
  modified_base 15: mod_base = um
  modified_base 16: mod_base = OTHER; note = 2'- fluoro
  modified_base 17: mod_base = cm
  modified_base 18: mod_base = OTHER; note = 2'-O- methyl
  modified_base 19: mod_base = OTHER; note = 2'-O- methyl
  modified_base 20: mod_base = gm
  modified_base 21: mod_base = OTHER; note = 2'-O- methyl
aaggttgcttttattccaaga

SEQ ID NO: 625 - RNA, 19 nt, synthetic construct
  source 1..19: mol_type = other RNA
  modified_base 1: mod_base = um
  modified_base 2: mod_base = um
  modified_base 3: mod_base = gm
  modified_base 4: mod_base = gm
  modified_base 5: mod_base = OTHER; note = 2'- fluoro
  modified_base 6: mod_base = OTHER; note = 2'-O- methyl
  modified_base 7: mod_base = OTHER; note = 2'- fluoro
  modified_base 8: mod_base = OTHER; note = 2'- fluoro
  modified_base 9: mod_base = OTHER; note = 2'- fluoro
  modified_base 10: mod_base = OTHER; note = 2'-O- methyl
  modified_base 11: mod_base = OTHER; note = 2'-O- methyl
  modified_base 12: mod_base = gm
  modified_base 13: mod_base = cm
  modified_base 14: mod_base = OTHER; note = 2'-O- methyl
  modified_base 15: mod_base = OTHER; note = 2'-O- methyl
  modified_base 16: mod_base = cm
  modified_base 17: mod_base = cm
  modified_base 18: mod_base = um
  modified_base 19: mod_base = um
  misc_binding 19: bound_moiety = L96
ttggaataaaagcaacctt

SEQ ID NO: 626 - RNA, 21 nt, synthetic construct
  source 1..21: mol_type = other RNA
  modified_base 1: mod_base = OTHER; note = 2'-O- methyl
  modified_base 2: mod_base = OTHER; note = 2'- fluoro
  modified_base 3: mod_base = gm
  modified_base 4: mod_base = gm
  modified_base 5: mod_base = um
  modified_base 6: mod_base = OTHER; note = 2'- fluoro
  modified_base 7: mod_base = gm
  modified_base 8: mod_base = OTHER; note = 2'- fluoro
  modified_base 9: mod_base = OTHER; note = 2'- fluoro
  modified_base 10: mod_base = um
  modified_base 11: mod_base = um
  modified_base 12: mod_base = um
  modified_base 13: mod_base = OTHER; note = 2'-O- methyl
  modified_base 14: mod_base = OTHER; note = 2'- fluoro
  modified_base 15: mod_base = um
  modified_base 16: mod_base = OTHER; note = 2'- fluoro
  modified_base 17: mod_base = cm
  modified_base 18: mod_base = OTHER; note = 2'-O- methyl
  modified_base 19: mod_base = OTHER; note = 2'-O- methyl
  modified_base 20: mod_base = gm
  modified_base 21: mod_base = OTHER; note = 2'-O- methyl
aaggttgcttttattccaaga

SEQ ID NO: 627 - RNA, 20 nt, synthetic construct
  source 1..20: mol_type = other RNA
  modified_base 1: mod_base = cm
  modified_base 2: mod_base = um
  modified_base 3: mod_base = um
  modified_base 4: mod_base = gm
  modified_base 5: mod_base = gm
  modified_base 6: mod_base = OTHER; note = 2'-O- methyl
  modified_base 7: mod_base = OTHER; note = 2'-O- methyl
  modified_base 8: mod_base = OTHER; note = 2'- fluoro
  modified_base 9: mod_base = OTHER; note = 2'- fluoro
  modified_base 10: mod_base = OTHER; note = 2'- fluoro
  modified_base 11: mod_base = OTHER; note = 2'-O- methyl
  modified_base 12: mod_base = OTHER; note = 2'-O- methyl
  modified_base 13: mod_base = gm
  modified_base 14: mod_base = cm
  modified_base 15: mod_base = OTHER; note = 2'-O- methyl
  modified_base 16: mod_base = OTHER; note = 2'-O- methyl
  modified_base 17: mod_base = cm
  modified_base 18: mod_base = cm
  modified_base 19: mod_base = um
  modified_base 20: mod_base = um
  misc_binding 20: bound_moiety = L96
cttggaataaaagcaacctt

SEQ ID NO: 628 - RNA, 22 nt, synthetic construct
  source 1..22: mol_type = other RNA
  modified_base 1: mod_base = OTHER; note = 2'-O- methyl
  modified_base 2: mod_base = OTHER; note = 2'- fluoro
  modified_base 3: mod_base = gm
  modified_base 4: mod_base = gm
  modified_base 5: mod_base = um
  modified_base 6: mod_base = OTHER; note = 2'- fluoro
  modified_base 7: mod_base = gm
  modified_base 8: mod_base = cm
  modified_base 9: mod_base = um
  modified_base 10: mod_base = um
  modified_base 11: mod_base = um
  modified_base 12: mod_base = um
  modified_base 13: mod_base = OTHER; note = 2'-O- methyl
  modified_base 14: mod_base = OTHER; note = 2'- fluoro
  modified_base 15: mod_base = um
  modified_base 16: mod_base = OTHER; note = 2'- fluoro
  modified_base 17: mod_base = cm
  modified_base 18: mod_base = OTHER; note = 2'-O- methyl
  modified_base 19: mod_base = OTHER; note = 2'-O- methyl
  modified_base 20: mod_base = gm
  modified_base 21: mod_base = OTHER; note = 2'-O- methyl
  modified_base 22: mod_base = OTHER; note = 2'-O- methyl
aaggttgcttttattccaagaa

SEQ ID NO: 629 - RNA, 20 nt, synthetic construct
  source 1..20: mol_type = other RNA
  modified_base 1: mod_base = cm
  modified_base 2: mod_base = um
  modified_base 3: mod_base = um
  modified_base 4: mod_base = gm
  modified_base 5: mod_base = gm
  modified_base 6: mod_base = OTHER; note = 2'- fluoro
  modified_base 7: mod_base = OTHER; note = 2'-O- methyl
  modified_base 8: mod_base = OTHER; note = 2'- fluoro
  modified_base 9: mod_base = OTHER; note = 2'- fluoro
  modified_base 10: mod_base = OTHER; note = 2'- fluoro
  modified_base 11: mod_base = OTHER; note = 2'-O- methyl
  modified_base 12: mod_base = OTHER; note = 2'-O- methyl
  modified_base 13: mod_base = gm
  modified_base 14: mod_base = cm
  modified_base 15: mod_base = OTHER; note = 2'-O- methyl
  modified_base 16: mod_base = OTHER; note = 2'-O- methyl
  modified_base 17: mod_base = cm
  modified_base 18: mod_base = cm
  modified_base 19: mod_base = um
  modified_base 20: mod_base = um
  misc_binding 20: bound_moiety = L96
cttggaataaaagcaacctt

SEQ ID NO: 630 - RNA, 22 nt, synthetic construct
  source 1..22: mol_type = other RNA
  modified_base 1: mod_base = OTHER; note = 2'-O- methyl
  modified_base 2: mod_base = OTHER; note = 2'- fluoro
  modified_base 3: mod_base = gm
  modified_base 4: mod_base = gm
  modified_base 5: mod_base = um
  modified_base 6: mod_base = OTHER; note = 2'- fluoro
  modified_base 7: mod_base = gm
  modified_base 8: mod_base = OTHER; note = 2'- fluoro
  modified_base 9: mod_base = OTHER; note = 2'- fluoro
  modified_base 10: mod_base = um
  modified_base 11: mod_base = um
  modified_base 12: mod_base = um
  modified_base 13: mod_base = OTHER; note = 2'-O- methyl
  modified_base 14: mod_base = OTHER; note = 2'- fluoro
  modified_base 15: mod_base = um
  modified_base 16: mod_base = OTHER; note = 2'- fluoro
  modified_base 17: mod_base = cm
  modified_base 18: mod_base = OTHER; note = 2'-O- methyl
  modified_base 19: mod_base = OTHER; note = 2'-O- methyl
  modified_base 20: mod_base = gm
  modified_base 21: mod_base = OTHER; note = 2'-O- methyl
  modified_base 22: mod_base = OTHER; note = 2'-O- methyl
aaggttgcttttattccaagaa

SEQ ID NO: 631 - RNA, 21 nt, synthetic construct
  source 1..21: mol_type = other RNA
  modified_base 1: mod_base = um
  modified_base 2: mod_base = cm
  modified_base 3: mod_base = um
  modified_base 4: mod_base = um
  modified_base 5: mod_base = gm
  modified_base 6: mod_base = gm
  modified_base 7: mod_base = OTHER; note = 2'-O- methyl
  modified_base 8: mod_base = OTHER; note = 2'-O- methyl
  modified_base 9: mod_base = OTHER; note = 2'- fluoro
  modified_base 10: mod_base = OTHER; note = 2'- fluoro
  modified_base 11: mod_base = OTHER; note = 2'- fluoro
  modified_base 12: mod_base = OTHER; note = 2'-O- methyl
  modified_base 13: mod_base = OTHER; note = 2'-O- methyl
  modified_base 14: mod_base = gm
  modified_base 15: mod_base = cm
  modified_base 16: mod_base = OTHER; note = 2'-O- methyl
  modified_base 17: mod_base = OTHER; note = 2'-O- methyl
  modified_base 18: mod_base = cm
  modified_base 19: mod_base = cm
  modified_base 20: mod_base = um
  modified_base 21: mod_base = um
  misc_binding 21: bound_moiety = L96
tcttggaataaaagcaacctt

SEQ ID NO: 632 - RNA, 21 nt, synthetic construct
  source 1..21: mol_type = other RNA
  modified_base 1: mod_base = OTHER; note = 2'-O- methyl
  modified_base 2: mod_base = OTHER; note = 2'- fluoro
  modified_base 3: mod_base = gm
  modified_base 4: mod_base = gm
  modified_base 5: mod_base = um
  modified_base 6: mod_base = OTHER; note = 2'- fluoro
  modified_base 7: mod_base = gm
  modified_base 8: mod_base = cm
  modified_base 9: mod_base = um
  modified_base 10: mod_base = um
  modified_base 11: mod_base = um
  modified_base 12: mod_base = um
  modified_base 13: mod_base = OTHER; note = 2'-O- methyl
  modified_base 14: mod_base = OTHER; note = 2'- fluoro
  modified_base 15: mod_base = um
  modified_base 16: mod_base = OTHER; note = 2'- fluoro
  modified_base 17: mod_base = cm
  modified_base 18: mod_base = OTHER; note = 2'-O- methyl
  modified_base 19: mod_base = OTHER; note = 2'-O- methyl
  modified_base 20: mod_base = gm
  modified_base 21: mod_base = OTHER; note = 2'-O- methyl
  modified_base 1: mod_base = OTHER; note = Ethylene Vinyl Phosphate Modification
aaggttgcttttattccaaga

SEQ ID NO: 633 - RNA, 21 nt, synthetic construct
  source 1..21: mol_type = other RNA
  modified_base 1: mod_base = OTHER; note = 2'-O- methyl
  modified_base 2: mod_base = OTHER; note = 2'- fluoro
  modified_base 3: mod_base = gm
  modified_base 4: mod_base = gm
  modified_base 5: mod_base = um
  modified_base 6: mod_base = OTHER; note = 2'- fluoro
  modified_base 7: mod_base = gm
  modified_base 8: mod_base = OTHER; note = 2'- fluoro
  modified_base 9: mod_base = OTHER; note = 2'- fluoro
  modified_base 10: mod_base = um
  modified_base 11: mod_base = um
  modified_base 12: mod_base = um
  modified_base 13: mod_base = OTHER; note = 2'-O- methyl
  modified_base 14: mod_base = OTHER; note = 2'- fluoro
  modified_base 15: mod_base = um
  modified_base 16: mod_base = OTHER; note = 2'- fluoro
  modified_base 17: mod_base = cm
  modified_base 18: mod_base = OTHER; note = 2'-O- methyl
  modified_base 19: mod_base = OTHER; note = 2'-O- methyl
  modified_base 20: mod_base = gm
  modified_base 21: mod_base = OTHER; note = 2'-O- methyl
  modified_base 1: mod_base = OTHER; note = Ethylene Vinyl Phosphate Modification
aaggttgcttttattccaaga

SEQ ID NO: 634 - RNA, 22 nt, synthetic construct
  source 1..22: mol_type = other RNA
  modified_base 1: mod_base = OTHER; note = 2'-O- methyl
  modified_base 2: mod_base = OTHER; note = 2'- fluoro
  modified_base 3: mod_base = gm
  modified_base 4: mod_base = gm
  modified_base 5: mod_base = um
  modified_base 6: mod_base = OTHER; note = 2'- fluoro
  modified_base 7: mod_base = gm
  modified_base 8: mod_base = cm
  modified_base 9: mod_base = um
  modified_base 10: mod_base = um
  modified_base 11: mod_base = um
  modified_base 12: mod_base = um
  modified_base 13: mod_base = OTHER; note = 2'-O- methyl
  modified_base 14: mod_base = OTHER; note = 2'- fluoro
  modified_base 15: mod_base = um
  modified_base 16: mod_base = OTHER; note = 2'- fluoro
  modified_base 17: mod_base = cm
  modified_base 18: mod_base = OTHER; note = 2'-O- methyl
  modified_base 19: mod_base = OTHER; note = 2'-O- methyl
  modified_base 20: mod_base = gm
  modified_base 21: mod_base = OTHER; note = 2'-O- methyl
  modified_base 22: mod_base = OTHER; note = 2'-O- methyl
  modified_base 1: mod_base = OTHER; note = Ethylene Vinyl Phosphate Modification
aaggttgcttttattccaagaa

SEQ ID NO: 635 - RNA, 22 nt, synthetic construct
  source 1..22: mol_type = other RNA
  modified_base 1: mod_base = OTHER; note = 2'-O- methyl
  modified_base 2: mod_base = OTHER; note = 2'- fluoro
  modified_base 3: mod_base = gm
  modified_base 4: mod_base = gm
  modified_base 5: mod_base = um
  modified_base 6: mod_base = OTHER; note = 2'- fluoro
  modified_base 7: mod_base = gm
  modified_base 8: mod_base = OTHER; note = 2'- fluoro
  modified_base 9: mod_base = OTHER; note = 2'- fluoro
  modified_base 10: mod_base = um
  modified_base 11: mod_base = um
  modified_base 12: mod_base = um
  modified_base 13: mod_base = OTHER; note = 2'-O- methyl
  modified_base 14: mod_base = OTHER; note = 2'- fluoro
  modified_base 15: mod_base = um
  modified_base 16: mod_base = OTHER; note = 2'- fluoro
  modified_base 17: mod_base = cm
  modified_base 18: mod_base = OTHER; note = 2'-O- methyl
  modified_base 19: mod_base = OTHER; note = 2'-O- methyl
  modified_base 20: mod_base = gm
  modified_base 21: mod_base = OTHER; note = 2'-O- methyl
  modified_base 22: mod_base = OTHER; note = 2'-O- methyl
  modified_base 1: mod_base = OTHER; note = Ethylene Vinyl Phosphate Modification
aaggttgcttttattccaagaa

SEQ ID NO: 636 - RNA, 23 nt, synthetic construct
  source 1..23: mol_type = other RNA
  modified_base 1: mod_base = OTHER; note = 2'-O- methyl
  modified_base 2: mod_base = OTHER; note = 2'- fluoro
  modified_base 3: mod_base = gm
  modified_base 4: mod_base = gm
  modified_base 5: mod_base = um
  modified_base 6: mod_base = OTHER; note = 2'- fluoro
  modified_base 7: mod_base = gm
  modified_base 8: mod_base = cm
  modified_base 9: mod_base = um
  modified_base 10: mod_base = um
  modified_base 11: mod_base = um
  modified_base 12: mod_base = um
  modified_base 13: mod_base = OTHER; note = 2'-O- methyl
  modified_base 14: mod_base = OTHER; note = 2'- fluoro
  modified_base 15: mod_base = um
  modified_base 16: mod_base = OTHER; note = 2'- fluoro
  modified_base 17: mod_base = cm
  modified_base 18: mod_base = OTHER; note = 2'-O- methyl
  modified_base 19: mod_base = OTHER; note = 2'-O- methyl
  modified_base 20: mod_base = gm
  modified_base 21: mod_base = OTHER; note = 2'-O- methyl
  modified_base 22: mod_base = OTHER; note = 2'-O- methyl
  modified_base 23: mod_base = cm
  modified_base 1: mod_base = OTHER; note = Ethylene Vinyl Phosphate Modification
aaggttgcttttattccaagaac

SEQ ID NO: 637 - RNA, 23 nt, synthetic construct
  source 1..23: mol_type = other RNA
  modified_base 1: mod_base = OTHER; note = 2'-O- methyl
  modified_base 2: mod_base = OTHER; note = 2'- fluoro
  modified_base 3: mod_base = gm
  modified_base 4: mod_base = gm
  modified_base 5: mod_base = um
  modified_base 6: mod_base = OTHER; note = 2'- fluoro
  modified_base 7: mod_base = gm
  modified_base 8: mod_base = OTHER; note = 2'- fluoro
  modified_base 9: mod_base = OTHER; note = 2'- fluoro
  modified_base 10: mod_base = um
  modified_base 11: mod_base = um
  modified_base 12: mod_base = um
  modified_base 13: mod_base = OTHER; note = 2'-O- methyl
  modified_base 14: mod_base = OTHER; note = 2'- fluoro
  modified_base 15: mod_base = um
  modified_base 16: mod_base = OTHER; note = 2'- fluoro
  modified_base 17: mod_base = cm
  modified_base 18: mod_base = OTHER; note = 2'-O- methyl
  modified_base 19: mod_base = OTHER; note = 2'-O- methyl
  modified_base 20: mod_base = gm
  modified_base 21: mod_base = OTHER; note = 2'-O- methyl
  modified_base 22: mod_base = OTHER; note = 2'-O- methyl
  modified_base 23: mod_base = cm
  modified_base 1: mod_base = OTHER; note = Ethylene Vinyl Phosphate Modification
aaggttgcttttattccaagaac

SEQ ID NO: 638 - RNA, 19 nt, synthetic construct
  source 1..19: mol_type = other RNA
  modified_base 1: mod_base = OTHER; note = 2'-O- methyl
  modified_base 2: mod_base = OTHER; note = 2'-O- methyl
  modified_base 3: mod_base = um
  modified_base 4: mod_base = OTHER; note = 2'-O- methyl
  modified_base 5: mod_base = OTHER; note = 2'-O- methyl
  modified_base 6: mod_base = OTHER; note = 2'-O- methyl
  modified_base 7: mod_base = OTHER; note = 2'- fluoro
  modified_base 8: mod_base = OTHER; note = 2'- fluoro
  modified_base 9: mod_base = OTHER; note = 2'- fluoro
  modified_base 10: mod_base = OTHER; note = 2'-O- methyl
  modified_base 11: mod_base = OTHER; note = 2'-O- methyl
  modified_base 12: mod_base = cm
  modified_base 13: mod_base = cm
  modified_base 14: mod_base = um
  modified_base 15: mod_base = cm
  modified_base 16: mod_base = OTHER; note = 2'-O- methyl
  modified_base 17: mod_base = gm
  modified_base 18: mod_base = OTHER; note = 2'-O- methyl
  modified_base 19: mod_base = OTHER; note = 2'-O- methyl
  misc_binding 19: bound_moiety = L96
aataaaagcaacctcagaa

SEQ ID NO: 639 - RNA, 21 nt, synthetic construct
  source 1..21: mol_type = other RNA
  modified_base 1: mod_base = um
  modified_base 2: mod_base = OTHER; note = 2'- fluoro
  modified_base 3: mod_base = cm
  modified_base 4: mod_base = um
  modified_base 5: mod_base = gm
  modified_base 6: mod_base = OTHER; note = 2'- fluoro
  modified_base 7: mod_base = gm
  modified_base 8: mod_base = gm
  modified_base 9: mod_base = um
  modified_base 10: mod_base = um
  modified_base 11: mod_base = gm
  modified_base 12: mod_base = cm
  modified_base 13: mod_base = um
  modified_base 14: mod_base = OTHER; note = 2'- fluoro
  modified_base 15: mod_base = um
  modified_base 16: mod_base = OTHER; note = 2'- fluoro
  modified_base 17: mod_base = OTHER; note = 2'-O- methyl
  modified_base 18: mod_base = um
  modified_base 19: mod_base = um
  modified_base 20: mod_base = cm
  modified_base 21: mod_base = cm
ttctgaggttgcttttattcc

SEQ ID NO: 640 - RNA, 19 nt, synthetic construct
  source 1..19: mol_type = other RNA
  modified_base 1: mod_base = OTHER; note = 2'-O- methyl
  modified_base 2: mod_base = OTHER; note = 2'-O- methyl
  modified_base 3: mod_base = um
  modified_base 4: mod_base = OTHER; note = 2'-O- methyl
  modified_base 5: mod_base = OTHER; note = 2'- fluoro
  modified_base 6: mod_base = OTHER; note = 2'-O- methyl
  modified_base 7: mod_base = OTHER; note = 2'- fluoro
  modified_base 8: mod_base = OTHER; note = 2'- fluoro
  modified_base 9: mod_base = OTHER; note = 2'- fluoro
  modified_base 10: mod_base = OTHER; note = 2'-O- methyl
  modified_base 11: mod_base = OTHER; note = 2'-O- methyl
  modified_base 12: mod_base = cm
  modified_base 13: mod_base = cm
  modified_base 14: mod_base = um
  modified_base 15: mod_base = cm
  modified_base 16: mod_base = OTHER; note = 2'-O- methyl
  modified_base 17: mod_base = gm
  modified_base 18: mod_base = OTHER; note = 2'-O- methyl
  modified_base 19: mod_base = OTHER; note = 2'-O- methyl
  misc_binding 19: bound_moiety = L96
aataaaagcaacctcagaa

SEQ ID NO: 641 - RNA, 21 nt, synthetic construct
  source 1..21: mol_type = other RNA
  modified_base 1: mod_base = um
  modified_base 2: mod_base = OTHER; note = 2'- fluoro
  modified_base 3: mod_base = cm
  modified_base 4: mod_base = um
  modified_base 5: mod_base = gm
  modified_base 6: mod_base = OTHER; note = 2'- fluoro
  modified_base 7: mod_base = gm
  modified_base 8: mod_base = OTHER; note = 2'- fluoro
  modified_base 9: mod_base = OTHER; note = 2'- fluoro
  modified_base 10: mod_base = um
  modified_base 11: mod_base = gm
  modified_base 12: mod_base = cm
  modified_base 13: mod_base = um
  modified_base 14: mod_base = OTHER; note = 2'- fluoro
  modified_base 15: mod_base = um
  modified_base 16: mod_base = OTHER; note = 2'- fluoro
  modified_base 17: mod_base = OTHER; note = 2'-O- methyl
  modified_base 18: mod_base = um
  modified_base 19: mod_base = um
  modified_base 20: mod_base = cm
  modified_base 21: mod_base = cm
ttctgaggttgcttttattcc

SEQ ID NO: 642 - RNA, 20 nt, synthetic construct
  source 1..20: mol_type = other RNA
  modified_base 1: mod_base = gm
  modified_base 2: mod_base = OTHER; note = 2'-O- methyl
  modified_base 3: mod_base = OTHER; note = 2'-O- methyl
  modified_base 4: mod_base = um
  modified_base 5: mod_base = OTHER; note = 2'-O- methyl
  modified_base 6: mod_base = OTHER; note = 2'-O- methyl
  modified_base 7: mod_base = OTHER; note = 2'-O- methyl
  modified_base 8: mod_base = OTHER; note = 2'- fluoro
  modified_base 9: mod_base = OTHER; note = 2'- fluoro
  modified_base 10: mod_base = OTHER; note = 2'- fluoro
  modified_base 11: mod_base = OTHER; note = 2'-O- methyl
  modified_base 12: mod_base = OTHER; note = 2'-O- methyl
  modified_base 13: mod_base = cm
  modified_base 14: mod_base = cm
  modified_base 15: mod_base = um
  modified_base 16: mod_base = cm
  modified_base 17: mod_base = OTHER; note = 2'-O- methyl
  modified_base 18: mod_base = gm
  modified_base 19: mod_base = OTHER; note = 2'-O- methyl
  modified_base 20: mod_base = OTHER; note = 2'-O- methyl
  misc_binding 20: bound_moiety = L96
gaataaaagcaacctcagaa

SEQ ID NO: 643 - RNA, 22 nt, synthetic construct
  source 1..22: mol_type = other RNA
  modified_base 1: mod_base = um
  modified_base 2: mod_base = OTHER; note = 2'- fluoro
  modified_base 3: mod_base = cm
  modified_base 4: mod_base = um
  modified_base 5: mod_base = gm
  modified_base 6: mod_base = OTHER; note = 2'- fluoro
  modified_base 7: mod_base = gm
  modified_base 8: mod_base = gm
  modified_base 9: mod_base = um
  modified_base 10: mod_base = um
  modified_base 11: mod_base = gm
  modified_base 12: mod_base = cm
  modified_base 13: mod_base = um
  modified_base 14: mod_base = OTHER; note = 2'- fluoro
  modified_base 15: mod_base = um
  modified_base 16: mod_base = OTHER; note = 2'- fluoro
  modified_base 17: mod_base = OTHER; note = 2'-O- methyl
  modified_base 18: mod_base = um
  modified_base 19: mod_base = um
  modified_base 20: mod_base = cm
  modified_base 21: mod_base = cm
  modified_base 22: mod_base = OTHER; note = 2'-O- methyl
ttctgaggttgcttttattcca

SEQ ID NO: 644 - RNA, 20 nt, synthetic construct
  source 1..20: mol_type = other RNA
  modified_base 1: mod_base = gm
  modified_base 2: mod_base = OTHER; note = 2'-O- methyl
  modified_base 3: mod_base = OTHER; note = 2'-O- methyl
  modified_base 4: mod_base = um
  modified_base 5: mod_base = OTHER; note = 2'-O- methyl
  modified_base 6: mod_base = OTHER; note = 2'- fluoro
  modified_base 7: mod_base = OTHER; note = 2'-O- methyl
  modified_base 8: mod_base = OTHER; note = 2'- fluoro
  modified_base 9: mod_base = OTHER; note = 2'- fluoro
  modified_base 10: mod_base = OTHER; note = 2'- fluoro
  modified_base 11: mod_base = OTHER; note = 2'-O- methyl
  modified_base 12: mod_base = OTHER; note = 2'-O- methyl
  modified_base 13: mod_base = cm
  modified_base 14: mod_base = cm
  modified_base 15: mod_base = um
  modified_base 16: mod_base = cm
  modified_base 17: mod_base = OTHER; note = 2'-O- methyl
  modified_base 18: mod_base = gm
  modified_base 19: mod_base = OTHER; note = 2'-O- methyl
  modified_base 20: mod_base = OTHER; note = 2'-O- methyl
  misc_binding 20: bound_moiety = L96
gaataaaagcaacctcagaa

SEQ ID NO: 645 - RNA, 22 nt, synthetic construct
  source 1..22: mol_type = other RNA
  modified_base 1: mod_base = um
  modified_base 2: mod_base = OTHER; note = 2'- fluoro
  modified_base 3: mod_base = cm
  modified_base 4: mod_base = um
  modified_base 5: mod_base = gm
  modified_base 6: mod_base = OTHER; note = 2'- fluoro
  modified_base 7: mod_base = gm
  modified_base 8: mod_base = OTHER; note = 2'- fluoro
  modified_base 9: mod_base = OTHER; note = 2'- fluoro
  modified_base 10: mod_base = um
  modified_base 11: mod_base = gm
  modified_base 12: mod_base = cm
  modified_base 13: mod_base = um
  modified_base 14: mod_base = OTHER; note = 2'- fluoro
  modified_base 15: mod_base = um
  modified_base 16: mod_base = OTHER; note = 2'- fluoro
  modified_base 17: mod_base = OTHER; note = 2'-O- methyl
  modified_base 18: mod_base = um
  modified_base 19: mod_base = um
  modified_base 20: mod_base = cm
  modified_base 21: mod_base = cm
  modified_base 22: mod_base = OTHER; note = 2'-O- methyl
ttctgaggttgcttttattcca

SEQ ID NO: 646 - RNA, 21 nt, synthetic construct
  source 1..21: mol_type = other RNA
  modified_base 1: mod_base = gm
  modified_base 2: mod_base = gm
  modified_base 3: mod_base = OTHER; note = 2'-O- methyl
  modified_base 4: mod_base = OTHER; note = 2'-O- methyl
  modified_base 5: mod_base = um
  modified_base 6: mod_base = OTHER; note = 2'-O- methyl
  modified_base 7: mod_base = OTHER; note = 2'-O- methyl
  modified_base 8: mod_base = OTHER; note = 2'-O- methyl
  modified_base 9: mod_base = OTHER; note = 2'- fluoro
  modified_base 10: mod_base = OTHER; note = 2'- fluoro
  modified_base 11: mod_base = OTHER; note = 2'- fluoro
  modified_base 12: mod_base = OTHER; note = 2'-O- methyl
  modified_base 13: mod_base = OTHER; note = 2'-O- methyl
  modified_base 14: mod_base = cm
  modified_base 15: mod_base = cm
  modified_base 16: mod_base = um
  modified_base 17: mod_base = cm
  modified_base 18: mod_base = OTHER; note = 2'-O- methyl
  modified_base 19: mod_base = gm
  modified_base 20: mod_base = OTHER; note = 2'-O- methyl
  modified_base 21: mod_base = OTHER; note = 2'-O- methyl
  misc_binding 21: bound_moiety = L96
ggaataaaagcaacctcagaa

SEQ ID NO: 647 - RNA, 21 nt, synthetic construct
  source 1..21: mol_type = other RNA
  modified_base 1: mod_base = um
  modified_base 2: mod_base = OTHER; note = 2'- fluoro
  modified_base 3: mod_base = cm
  modified_base 4: mod_base = um
  modified_base 5: mod_base = gm
  modified_base 6: mod_base = OTHER; note = 2'- fluoro
  modified_base 7: mod_base = gm
  modified_base 8: mod_base = gm
  modified_base 9: mod_base = um
  modified_base 10: mod_base = um
  modified_base 11: mod_base = gm
  modified_base 12: mod_base = cm
  modified_base 13: mod_base = um
  modified_base 14: mod_base = OTHER; note = 2'- fluoro
  modified_base 15: mod_base = um
  modified_base 16: mod_base = OTHER; note = 2'- fluoro
  modified_base 17: mod_base = OTHER; note = 2'-O- methyl
  modified_base 18: mod_base = um
  modified_base 19: mod_base = um
  modified_base 20: mod_base = cm
  modified_base 21: mod_base = cm
  modified_base 1: mod_base = OTHER; note = Ethylene Vinyl Phosphate Modification
ttctgaggttgcttttattcc

SEQ ID NO: 648 - RNA, 21 nt, synthetic construct
  source 1..21: mol_type = other RNA
  modified_base 1: mod_base = um
  modified_base 2: mod_base = OTHER; note = 2'- fluoro
  modified_base 3: mod_base = cm
  modified_base 4: mod_base = um
  modified_base 5: mod_base = gm
  modified_base 6: mod_base = OTHER; note = 2'- fluoro
  modified_base 7: mod_base = gm
  modified_base 8: mod_base = OTHER; note = 2'- fluoro
  modified_base 9: mod_base = OTHER; note = 2'- fluoro
  modified_base 10: mod_base = um
  modified_base 11: mod_base = gm
  modified_base 12: mod_base = cm
  modified_base 13: mod_base = um
  modified_base 14: mod_base = OTHER; note = 2'- fluoro
  modified_base 15: mod_base = um
  modified_base 16: mod_base = OTHER; note = 2'- fluoro
  modified_base 17: mod_base = OTHER; note = 2'-O- methyl
  modified_base 18: mod_base = um
  modified_base 19: mod_base = um
  modified_base 20: mod_base = cm
  modified_base 21: mod_base = cm
  modified_base 1: mod_base = OTHER; note = Ethylene Vinyl Phosphate Modification
ttctgaggttgcttttattcc

SEQ ID NO: 649 - RNA, 22 nt, synthetic construct
  source 1..22: mol_type = other RNA
  modified_base 1: mod_base = um
  modified_base 2: mod_base = OTHER; note = 2'- fluoro
  modified_base 3: mod_base = cm
  modified_base 4: mod_base = um
  modified_base 5: mod_base = gm
  modified_base 6: mod_base = OTHER; note = 2'- fluoro
  modified_base 7: mod_base = gm
  modified_base 8: mod_base = gm
  modified_base 9: mod_base = um
  modified_base 10: mod_base = um
  modified_base 11: mod_base = gm
  modified_base 12: mod_base = cm
  modified_base 13: mod_base = um
  modified_base 14: mod_base = OTHER; note = 2'- fluoro
  modified_base 15: mod_base = um
  modified_base 16: mod_base = OTHER; note = 2'- fluoro
  modified_base 17: mod_base = OTHER; note = 2'-O- methyl
  modified_base 18: mod_base = um
  modified_base 19: mod_base = um
  modified_base 20: mod_base = cm
  modified_base 21: mod_base = cm
  modified_base 22: mod_base = OTHER; note = 2'-O- methyl
  modified_base 1: mod_base = OTHER; note = Ethylene Vinyl Phosphate Modification
ttctgaggttgcttttattcca

SEQ ID NO: 650 - RNA, 22 nt, synthetic construct
  source 1..22: mol_type = other RNA
  modified_base 1: mod_base = um
  modified_base 2: mod_base = OTHER; note = 2'- fluoro
  modified_base 3: mod_base = cm
  modified_base 4: mod_base = um
  modified_base 5: mod_base = gm
  modified_base 6: mod_base = OTHER; note = 2'- fluoro
  modified_base 7: mod_base = gm
  modified_base 8: mod_base = OTHER; note = 2'- fluoro
  modified_base 9: mod_base = OTHER; note = 2'- fluoro
  modified_base 10: mod_base = um
  modified_base 11: mod_base = gm
  modified_base 12: mod_base = cm
  modified_base 13: mod_base = um
  modified_base 14: mod_base = OTHER; note = 2'- fluoro
  modified_base 15: mod_base = um
  modified_base 16: mod_base = OTHER; note = 2'- fluoro
  modified_base 17: mod_base = OTHER; note = 2'-O- methyl
  modified_base 18: mod_base = um
  modified_base 19: mod_base = um
  modified_base 20: mod_base = cm
  modified_base 21: mod_base = cm
  modified_base 22: mod_base = OTHER; note = 2'-O- methyl
  modified_base 1: mod_base = OTHER; note = Ethylene Vinyl Phosphate Modification
ttctgaggttgcttttattcca

SEQ ID NO: 651 - RNA, 23 nt, synthetic construct
  source 1..23: mol_type = other RNA
  modified_base 1: mod_base = um
  modified_base 2: mod_base = OTHER; note = 2'- fluoro
  modified_base 3: mod_base = cm
  modified_base 4: mod_base = um
  modified_base 5: mod_base = gm
  modified_base 6: mod_base = OTHER; note = 2'- fluoro
  modified_base 7: mod_base = gm
  modified_base 8: mod_base = gm
  modified_base 9: mod_base = um
  modified_base 10: mod_base = um
  modified_base 11: mod_base = gm
  modified_base 12: mod_base = cm
  modified_base 13: mod_base = um
  modified_base 14: mod_base = OTHER; note = 2'- fluoro
  modified_base 15: mod_base = um
  modified_base 16: mod_base = OTHER; note = 2'- fluoro
  modified_base 17: mod_base = OTHER; note = 2'-O- methyl
  modified_base 18: mod_base = um
  modified_base 19: mod_base = um
  modified_base 20: mod_base = cm
  modified_base 21: mod_base = cm
  modified_base 22: mod_base = OTHER; note = 2'-O- methyl
  modified_base 23: mod_base = OTHER; note = 2'-O- methyl
  modified_base 1: mod_base = OTHER; note = Ethylene Vinyl Phosphate Modification
ttctgaggttgcttttattccaa

SEQ ID NO: 652 - RNA, 23 nt, synthetic construct
  source 1..23: mol_type = other RNA
  modified_base 1: mod_base = um
  modified_base 2: mod_base = OTHER; note = 2'- fluoro
  modified_base 3: mod_base = cm
  modified_base 4: mod_base = um
  modified_base 5: mod_base = gm
  modified_base 6: mod_base = OTHER; note = 2'- fluoro
  modified_base 7: mod_base = gm
  modified_base 8: mod_base = OTHER; note = 2'- fluoro
  modified_base 9: mod_base = OTHER; note = 2'- fluoro
  modified_base 10: mod_base = um
  modified_base 11: mod_base = gm
  modified_base 12: mod_base = cm
  modified_base 13: mod_base = um
  modified_base 14: mod_base = OTHER; note = 2'- fluoro
  modified_base 15: mod_base = um
  modified_base 16: mod_base = OTHER; note = 2'- fluoro
  modified_base 17: mod_base = OTHER; note = 2'-O- methyl
  modified_base 18: mod_base = um
  modified_base 19: mod_base = um
  modified_base 20: mod_base = cm
  modified_base 21: mod_base = cm
  modified_base 22: mod_base = OTHER; note = 2'-O- methyl
  modified_base 23: mod_base = OTHER; note = 2'-O- methyl
  modified_base 1: mod_base = OTHER; note = Ethylene Vinyl Phosphate Modification
ttctgaggttgcttttattccaa

SEQ ID NO: 653 - RNA, 23 nt, synthetic construct
  source 1..23: mol_type = other RNA
  modified_base 1: mod_base = OTHER; note = 2'-O- methyl
  modified_base 2: mod_base = OTHER; note = 2'- fluoro
  modified_base 3: mod_base = um
  modified_base 4: mod_base = gm
  modified_base 5: mod_base = OTHER; note = Glycerol nucleic acid
  modified_base 6: mod_base = OTHER; note = 2'- fluoro
  modified_base 7: mod_base = um
  modified_base 8: mod_base = um
  modified_base 9: mod_base = um
  modified_base 10: mod_base = OTHER; note = 2'-O- methyl
  modified_base 11: mod_base = um
  modified_base 12: mod_base = um
  modified_base 13: mod_base = cm
  modified_base 14: mod_base = OTHER; note = 2'- fluoro
  modified_base 15: mod_base = OTHER; note = 2'-O- methyl
  modified_base 16: mod_base = OTHER; note = 2'- fluoro
  modified_base 17: mod_base = gm
  modified_base 18: mod_base = OTHER; note = 2'-O- methyl
  modified_base 19: mod_base = OTHER; note = 2'-O- methyl
  modified_base 20: mod_base = cm
  modified_base 21: mod_base = um
  modified_base 22: mod_base = cm
  modified_base 23: mod_base = um
  modified_base 1: mod_base = OTHER; note = Ethylene Vinyl Phosphate Modification
attgcttttattccaagaactct

SEQ ID NO: 654 - RNA, 23 nt, synthetic construct
  source 1..23: mol_type = other RNA
  modified_base 1: mod_base = OTHER; note = 2'-O- methyl
  modified_base 2: mod_base = OTHER; note = 2'- fluoro
  modified_base 3: mod_base = um
  modified_base 4: mod_base = gm
  modified_base 5: mod_base = cm
  modified_base 6: mod_base = OTHER; note = Glycerol nucleic acid
  modified_base 7: mod_base = um
  modified_base 8: mod_base = um
  modified_base 9: mod_base = um
  modified_base 10: mod_base = OTHER; note = 2'-O- methyl
  modified_base 11: mod_base = um
  modified_base 12: mod_base = um
  modified_base 13: mod_base = cm
  modified_base 14: mod_base = OTHER; note = 2'- fluoro
  modified_base 15: mod_base = OTHER; note = 2'-O- methyl
  modified_base 16: mod_base = OTHER; note = 2'- fluoro
  modified_base 17: mod_base = gm
  modified_base 18: mod_base = OTHER; note = 2'-O- methyl
  modified_base 19: mod_base = OTHER; note = 2'-O- methyl
  modified_base 20: mod_base = cm
  modified_base 21: mod_base = um
  modified_base 22: mod_base = cm
  modified_base 23: mod_base = um
  modified_base 1: mod_base = OTHER; note = Ethylene Vinyl Phosphate Modification
attgcttttattccaagaactct

SEQ ID NO: 655 - RNA, 23 nt, synthetic construct
  source 1..23: mol_type = other RNA
  modified_base 1: mod_base = OTHER; note = 2'-O- methyl
  modified_base 2: mod_base = OTHER; note = 2'- fluoro
  modified_base 3: mod_base = um
  modified_base 4: mod_base = gm
  modified_base 5: mod_base = cm
  modified_base 6: mod_base = OTHER; note = 2'- fluoro
  modified_base 7: mod_base = OTHER; note = Glycerol nucleic acid
  modified_base 8: mod_base = um
  modified_base 9: mod_base = um
  modified_base 10: mod_base = OTHER; note = 2'-O- methyl
  modified_base 11: mod_base = um
  modified_base 12: mod_base = um
  modified_base 13: mod_base = cm
  modified_base 14: mod_base = OTHER; note = 2'- fluoro
  modified_base 15: mod_base = OTHER; note = 2'-O- methyl
  modified_base 16: mod_base = OTHER; note = 2'- fluoro
  modified_base 17: mod_base = gm
  modified_base 18: mod_base = OTHER; note = 2'-O- methyl
  modified_base 19: mod_base = OTHER; note = 2'-O- methyl
  modified_base 20: mod_base = cm
  modified_base 21: mod_base = um
  modified_base 22: mod_base = cm
  modified_base 23: mod_base = um
  modified_base 1: mod_base = OTHER; note = Ethylene Vinyl Phosphate Modification
attgcttttattccaagaactct

SEQ ID NO: 656 - RNA, 23 nt, synthetic construct
  source 1..23: mol_type = other RNA
  modified_base 1: mod_base = OTHER; note = 2'-O- methyl
  modified_base 2: mod_base = OTHER; note = 2'- fluoro
  modified_base 3: mod_base = um
  modified_base 4: mod_base = gm
  modified_base 5: mod_base = cm
  modified_base 6: mod_base = OTHER; note = 2'- fluoro
  modified_base 7: mod_base = um
  modified_base 8: mod_base = OTHER; note = Glycerol nucleic acid
  modified_base 9: mod_base = um
  modified_base 10: mod_base = OTHER; note = 2'-O- methyl
  modified_base 11: mod_base = um
  modified_base 12: mod_base = um
  modified_base 13: mod_base = cm
  modified_base 14: mod_base = OTHER; note = 2'- fluoro
  modified_base 15: mod_base = OTHER; note = 2'-O- methyl
  modified_base 16: mod_base = OTHER; note = 2'- fluoro
  modified_base 17: mod_base = gm
  modified_base 18: mod_base = OTHER; note = 2'-O- methyl
  modified_base 19: mod_base = OTHER; note = 2'-O- methyl
  modified_base 20: mod_base = cm
  modified_base 21: mod_base = um
  modified_base 22: mod_base = cm
  modified_base 23: mod_base = um
  modified_base 1: mod_base = OTHER; note = Ethylene Vinyl Phosphate Modification
attgcttttattccaagaactct

SEQ ID NO: 657 - RNA, 23 nt, synthetic construct
  source 1..23: mol_type = other RNA
  modified_base 1: mod_base = OTHER; note = 2'-O- methyl
  modified_base 2: mod_base = OTHER; note = 2'- fluoro
  modified_base 3: mod_base = um
  modified_base 4: mod_base = gm
  modified_base 5: mod_base = cm
  modified_base 6: mod_base = um
  modified_base 7: mod_base = um
  modified_base 8: mod_base = um
  modified_base 9: mod_base = um
  modified_base 10: mod_base = OTHER; note = 2'-O- methyl
  modified_base 11: mod_base = um
  modified_base 12: mod_base = um
  modified_base 13: mod_base = cm
  modified_base 14: mod_base = OTHER; note = 2'- fluoro
  modified_base 15: mod_base = OTHER; note = 2'-O- methyl
  modified_base 16: mod_base = OTHER; note = 2'- fluoro
  modified_base 17: mod_base = gm
  modified_base 18: mod_base = OTHER; note = 2'-O- methyl
  modified_base 19: mod_base = OTHER; note = 2'-O- methyl
  modified_base 20: mod_base = cm
  modified_base 21: mod_base = um
  modified_base 22: mod_base = cm
  modified_base 23: mod_base = um
  modified_base 1: mod_base = OTHER; note = Ethylene Vinyl Phosphate Modification
attgcttttattccaagaactct

SEQ ID NO: 658 - RNA, 23 nt, synthetic construct
  source 1..23: mol_type = other RNA
  modified_base 1: mod_base = OTHER; note = 2'-O- methyl
  modified_base 2: mod_base = OTHER; note = 2'- fluoro
  modified_base 3: mod_base = um
  modified_base 4: mod_base = gm
  modified_base 5: mod_base = cm
  modified_base 6: mod_base = OTHER; note = 2'- fluoro
  modified_base 7: mod_base = um
  modified_base 8: mod_base = um
  modified_base 9: mod_base = um
  modified_base 10: mod_base = OTHER; note = 2'-O- methyl
  modified_base 11: mod_base = um
  modified_base 12: mod_base = um
  modified_base 13: mod_base = cm
  modified_base 14: mod_base = OTHER; note = 2'- fluoro
  modified_base 15: mod_base = OTHER; note = 2'-O- methyl
  modified_base 16: mod_base = OTHER; note = 2'- fluoro
  modified_base 17: mod_base = gm
  modified_base 18: mod_base = OTHER; note = 2'-O- methyl
  modified_base 19: mod_base = OTHER; note = 2'-O- methyl
  modified_base 20: mod_base = cm
  modified_base 21: mod_base = um
  modified_base 23: mod_base = um
  modified_base 22: mod_base = OTHER; note = 2'-O-methyl Inosine
  modified_base 1: mod_base = OTHER; note = Ethylene Vinyl Phosphate Modification
attgcttttattccaagaactnt

SEQ ID NO: 659 - RNA, 22 nt, synthetic construct
  source 1..22: mol_type = other RNA
  modified_base 1: mod_base = OTHER; note = 2'-O- methyl
  modified_base 2: mod_base = OTHER; note = 2'- fluoro
  modified_base 3: mod_base = um
  modified_base 4: mod_base = gm
  modified_base 5: mod_base = cm
  modified_base 6: mod_base = OTHER; note = 2'- fluoro
  modified_base 7: mod_base = um
  modified_base 8: mod_base = um
  modified_base 9: mod_base = um
  modified_base 10: mod_base = OTHER; note = 2'-O- methyl
  modified_base 11: mod_base = um
  modified_base 12: mod_base = um
  modified_base 13: mod_base = cm
  modified_base 14: mod_base = OTHER; note = 2'- fluoro
  modified_base 15: mod_base = OTHER; note = 2'-O- methyl
  modified_base 16: mod_base = OTHER; note = 2'- fluoro
  modified_base 17: mod_base = gm
  modified_base 18: mod_base = OTHER; note = 2'-O- methyl
  modified_base 19: mod_base = OTHER; note = 2'-O- methyl
  modified_base 20: mod_base = cm
  modified_base 22: mod_base = cm
  modified_base 22: mod_base = OTHER; note = Threose nucleic acid
  modified_base 1: mod_base = OTHER; note = Ethylene Vinyl Phosphate Modification
attgcttttattccaagaactc

SEQ ID NO: 660 - RNA, 22 nt, synthetic construct
  source 1..22: mol_type = other RNA
  modified_base 1: mod_base = OTHER; note = 2'-O- methyl
  modified_base 2: mod_base = OTHER; note = 2'- fluoro
  modified_base 3: mod_base = um
  modified_base 4: mod_base = gm
  modified_base 5: mod_base = cm
  modified_base 6: mod_base = OTHER; note = 2'- fluoro
  modified_base 7: mod_base = um
  modified_base 8: mod_base = um
  modified_base 9: mod_base = um
  modified_base 10: mod_base = OTHER; note = 2'-O- methyl
  modified_base 11: mod_base = um
  modified_base 12: mod_base = um
  modified_base 13: mod_base = cm
  modified_base 14: mod_base = OTHER; note = 2'- fluoro
  modified_base 15: mod_base = OTHER; note = 2'-O- methyl
  modified_base 16: mod_base = OTHER; note = 2'- fluoro
  modified_base 17: mod_base = gm
  modified_base 18: mod_base = OTHER; note = 2'-O- methyl
  modified_base 19: mod_base = OTHER; note = 2'-O- methyl
  modified_base 20: mod_base = cm
  modified_base 22: mod_base = cm
  modified_base 21: mod_base = OTHER; note = 2'-O-methyl Inosine
  modified_base 1: mod_base = OTHER; note = Ethylene Vinyl Phosphate Modification
attgcttttattccaagaacnc

SEQ ID NO: 661 - RNA, 21 nt, synthetic construct
  source 1..21: mol_type = other RNA
  modified_base 1: mod_base = OTHER; note = 2'- fluoro
  modified_base 2: mod_base = OTHER; note = 2'-O- methyl
  modified_base 3: mod_base = OTHER; note = 2'- fluoro
  modified_base 4: mod_base = OTHER; note = 2'-O- methyl
  modified_base 5: mod_base = OTHER; note = 2'- fluoro
  modified_base 6: mod_base = um
  modified_base 7: mod_base = OTHER; note = 2'- fluoro
  modified_base 8: mod_base = cm
  modified_base 9: mod_base = OTHER; note = 2'- fluoro
  modified_base 10: mod_base = um
  modified_base 11: mod_base = OTHER; note = 2'- fluoro
  modified_base 12: mod_base = gm
  modified_base 13: mod_base = OTHER; note = 2'- fluoro
  modified_base 14: mod_base = OTHER; note = 2'-O- methyl
  modified_base 15: mod_base = OTHER; note = 2'- fluoro
  modified_base 16: mod_base = OTHER; note = 2'-O- methyl
  modified_base 17: mod_base = OTHER; note = 2'- fluoro
  modified_base 18: mod_base = OTHER; note = 2'-O- methyl
  modified_base 19: mod_base = OTHER; note = 2'- fluoro
  modified_base 20: mod_base = um
  modified_base 21: mod_base = um
  misc_binding 21: bound_moiety = L96
cagagttcttggaataaaatt

SEQ ID NO: 662 - RNA, 21 nt, synthetic construct
  source 1..21: mol_type = other RNA
  modified_base 1: mod_base = um
  modified_base 2: mod_base = OTHER; note = 2'- fluoro
  modified_base 3: mod_base = um
  modified_base 4: mod_base = OTHER; note = 2'- fluoro
  modified_base 5: mod_base = OTHER; note = 2'-O- methyl
  modified_base 6: mod_base = OTHER; note = 2'- fluoro
  modified_base 7: mod_base = um
  modified_base 8: mod_base = OTHER; note = 2'- fluoro
  modified_base 9: mod_base = cm
  modified_base 10: mod_base = OTHER; note = 2'- fluoro
  modified_base 11: mod_base = OTHER; note = 2'-O- methyl
  modified_base 12: mod_base = OTHER; note = 2'- fluoro
  modified_base 13: mod_base = OTHER; note = 2'-O- methyl
  modified_base 14: mod_base = OTHER; note = 2'- fluoro
  modified_base 15: mod_base = cm
  modified_base 16: mod_base = OTHER; note = 2'- fluoro
  modified_base 17: mod_base = cm
  modified_base 18: mod_base = OTHER; note = 2'- fluoro
  modified_base 19: mod_base = gm
  modified_base 20: mod_base = um
  modified_base 21: mod_base = um
ttttattccaagaactctgtt

SEQ ID NO: 663 - RNA, 20 nt, synthetic construct
  source 1..20: mol_type = other RNA
attgcttttattccaagaac

SEQ ID NO: 664 - RNA, 19 nt, synthetic construct
  source 1..19: mol_type = other RNA
attgcttttattccaagaa

SEQ ID NO: 665 - RNA, 27 nt, synthetic construct
  source 1..27: mol_type = other RNA
attgcttttattccaagaactctctgt

SEQ ID NO: 666 - RNA, 25 nt, synthetic construct
  source 1..25: mol_type = other RNA
acagagttcttggaataaaagcaat

SEQ ID NO: 667 - RNA, 21 nt, synthetic construct
  source 1..21: mol_type = other RNA
  modified_base 1: mod_base = OTHER; note = 2'-O- methyl
  modified_base 2: mod_base = gm
  modified_base 3: mod_base = um
  modified_base 4: mod_base = um
  modified_base 5: mod_base = cm
  modified_base 6: mod_base = um
  modified_base 7: mod_base = um
  modified_base 8: mod_base = gm
  modified_base 9: mod_base = OTHER; note = 2'- fluoro
  modified_base 10: mod_base = OTHER; note = 2'- fluoro
  modified_base 11: mod_base = OTHER; note = 2'- fluoro
  modified_base 12: mod_base = um
  modified_base 13: mod_base = OTHER; note = 2'-O- methyl
  modified_base 14: mod_base = OTHER; note = 2'-O- methyl
  modified_base 15: mod_base = OTHER; note = 2'-O- methyl
  modified_base 16: mod_base = OTHER; note = 2'-O- methyl
  modified_base 17: mod_base = gm
  modified_base 18: mod_base = cm
  modified_base 19: mod_base = OTHER; note = 2'-O- methyl
  modified_base 20: mod_base = OTHER; note = 2'-O- methyl
  modified_base 21: mod_base = um
agttcttggaataaaagcaat

SEQ ID NO: 668 - RNA, 23 nt, synthetic construct
  source 1..23: mol_type = other RNA
  modified_base 1: mod_base = OTHER; note = 2'-O- methyl
  modified_base 2: mod_base = OTHER; note = 2'- fluoro
  modified_base 3: mod_base = um
  modified_base 4: mod_base = gm
  modified_base 5: mod_base = cm
  modified_base 6: mod_base = um
  modified_base 7: mod_base = um
  modified_base 8: mod_base = um
  modified_base 9: mod_base = um
  modified_base 10: mod_base = OTHER; note = 2'-O- methyl
  modified_base 11: mod_base = um
  modified_base 12: mod_base = OTHER; note = 2'- fluoro
  modified_base 13: mod_base = cm
  modified_base 14: mod_base = OTHER; note = 2'- fluoro
  modified_base 15: mod_base = OTHER; note = 2'-O- methyl
  modified_base 16: mod_base = OTHER; note = 2'- fluoro
  modified_base 17: mod_base = gm
  modified_base 18: mod_base = OTHER; note = 2'-O- methyl
  modified_base 19: mod_base = OTHER; note = 2'-O- methyl
  modified_base 20: mod_base = cm
  modified_base 21: mod_base = um
  modified_base 22: mod_base = cm
  modified_base 23: mod_base = um
attgcttttattccaagaactct

SEQ ID NO: 669 - RNA, 23 nt, synthetic construct
  source 1..23: mol_type = other RNA
  modified_base 1: mod_base = OTHER; note = 2'-O- methyl
  modified_base 2: mod_base = OTHER; note = 2'- fluoro
  modified_base 3: mod_base = um
  modified_base 4: mod_base = gm
  modified_base 5: mod_base = OTHER; note = 2'- fluoro
  modified_base 6: mod_base = um
  modified_base 7: mod_base = um
  modified_base 8: mod_base = um
  modified_base 9: mod_base = um
  modified_base 10: mod_base = OTHER; note = 2'-O- methyl
  modified_base 11: mod_base = um
  modified_base 12: mod_base = OTHER; note = 2'- fluoro
  modified_base 13: mod_base = cm
  modified_base 14: mod_base = OTHER; note = 2'- fluoro
  modified_base 15: mod_base = OTHER; note = 2'-O- methyl
  modified_base 16: mod_base = OTHER; note = 2'- fluoro
  modified_base 17: mod_base = gm
  modified_base 18: mod_base = OTHER; note = 2'-O- methyl
  modified_base 19: mod_base = OTHER; note = 2'-O- methyl
  modified_base 20: mod_base = cm
  modified_base 21: mod_base = um
  modified_base 22: mod_base = cm
  modified_base 23: mod_base = um
attgcttttattccaagaactct

SEQ ID NO: 670 - RNA, 23 nt, synthetic construct
  source 1..23: mol_type = other RNA
  modified_base 1: mod_base = OTHER; note = 2'-O- methyl
  modified_base 2: mod_base = OTHER; note = 2'- fluoro
  modified_base 3: mod_base = um
  modified_base 4: mod_base = gm
  modified_base 5: mod_base = cm
  modified_base 6: mod_base = um
  modified_base 7: mod_base = OTHER; note = 2'- fluoro
  modified_base 8: mod_base = um
  modified_base 9: mod_base = um
  modified_base 10: mod_base = OTHER; note = 2'-O- methyl
  modified_base 11: mod_base = um
  modified_base 12: mod_base = OTHER; note = 2'- fluoro
  modified_base 13: mod_base = cm
  modified_base 14: mod_base = OTHER; note = 2'- fluoro
  modified_base 15: mod_base = OTHER; note = 2'-O- methyl
  modified_base 16: mod_base = OTHER; note = 2'- fluoro
  modified_base 17: mod_base = gm
  modified_base 18: mod_base = OTHER; note = 2'-O- methyl
  modified_base 19: mod_base = OTHER; note = 2'-O- methyl
  modified_base 20: mod_base = cm
  modified_base 21: mod_base = um
  modified_base 22: mod_base = cm
  modified_base 23: mod_base = um
attgcttttattccaagaactct

SEQ ID NO: 671 - RNA, 23 nt, synthetic construct
  source 1..23: mol_type = other RNA
  modified_base 1: mod_base = OTHER; note = 2'-O- methyl
  modified_base 2: mod_base = OTHER; note = 2'- fluoro
  modified_base 3: mod_base = um
  modified_base 4: mod_base = gm
  modified_base 5: mod_base = OTHER; note = 2'- fluoro
  modified_base 6: mod_base = um
  modified_base 7: mod_base = um
  modified_base 8: mod_base = OTHER; note = 2'- fluoro
  modified_base 9: mod_base = um
  modified_base 10: mod_base = OTHER; note = 2'-O- methyl
  modified_base 11: mod_base = um
  modified_base 12: mod_base = OTHER; note = 2'- fluoro
  modified_base 13: mod_base = cm
  modified_base 14: mod_base = OTHER; note = 2'- fluoro
  modified_base 15: mod_base = OTHER; note = 2'-O- methyl
  modified_base 16: mod_base = OTHER; note = 2'- fluoro
  modified_base 17: mod_base = gm
  modified_base 18: mod_base = OTHER; note = 2'-O- methyl
  modified_base 19: mod_base = OTHER; note = 2'-O- methyl
  modified_base 20: mod_base = cm
  modified_base 21: mod_base = um
  modified_base 22: mod_base = cm
  modified_base 23: mod_base = um
attgcttttattccaagaactct

SEQ ID NO: 672 - RNA, 21 nt, synthetic construct
  source 1..21: mol_type = other RNA
  modified_base 1: mod_base = OTHER; note = 2'-O- methyl
  modified_base 2: mod_base = gm
  modified_base 3: mod_base = um
  modified_base 4: mod_base = um
  modified_base 5: mod_base = cm
  modified_base 6: mod_base = um
  modified_base 7: mod_base = OTHER; note = 2'- fluoro
  modified_base 8: mod_base = gm
  modified_base 9: mod_base = OTHER; note = 2'- fluoro
  modified_base 10: mod_base = OTHER; note = 2'- fluoro
  modified_base 11: mod_base = OTHER; note = 2'- fluoro
  modified_base 12: mod_base = um
  modified_base 13: mod_base = OTHER; note = 2'-O- methyl
  modified_base 14: mod_base = OTHER; note = 2'-O- methyl
  modified_base 15: mod_base = OTHER; note = 2'-O- methyl
  modified_base 16: mod_base = OTHER; note = 2'-O- methyl
  modified_base 17: mod_base = gm
  modified_base 18: mod_base = cm
  modified_base 19: mod_base = OTHER; note = 2'-O- methyl
  modified_base 20: mod_base = OTHER; note = 2'-O- methyl
  modified_base 21: mod_base = um
agttcttggaataaaagcaat

SEQ ID NO: 673 - RNA, 23 nt, synthetic construct
  source 1..23: mol_type = other RNA
  modified_base 1: mod_base = OTHER; note = 2'-O- methyl
  modified_base 2: mod_base = OTHER; note = 2'- fluoro
  modified_base 3: mod_base = um
  modified_base 4: mod_base = OTHER; note = 2'- fluoro
  modified_base 5: mod_base = cm
  modified_base 6: mod_base = OTHER; note = 2'- fluoro
  modified_base 7: mod_base = um
  modified_base 8: mod_base = OTHER; note = 2'- fluoro
  modified_base 9: mod_base = um
  modified_base 10: mod_base = OTHER; note = 2'- fluoro
  modified_base 11: mod_base = um
  modified_base 12: mod_base = OTHER; note = 2'- fluoro
  modified_base 13: mod_base = cm
  modified_base 14: mod_base = OTHER; note = 2'- fluoro
  modified_base 15: mod_base = OTHER; note = 2'-O- methyl
  modified_base 16: mod_base = OTHER; note = 2'- fluoro
  modified_base 17: mod_base = gm
  modified_base 18: mod_base = OTHER; note = 2'- fluoro
  modified_base 19: mod_base = OTHER; note = 2'-O- methyl
  modified_base 20: mod_base = OTHER; note = 2'- fluoro
  modified_base 21: mod_base = um
  modified_base 22: mod_base = cm
  modified_base 23: mod_base = um
attgcttttattccaagaactct

SEQ ID NO: 674 - RNA, 23 nt, synthetic construct
  source 1..23: mol_type = other RNA
  modified_base 1: mod_base = OTHER; note = 2'-O- methyl
  modified_base 2: mod_base = OTHER; note = 2'- fluoro
  modified_base 3: mod_base = um
  modified_base 4: mod_base = gm
  modified_base 5: mod_base = cm
  modified_base 6: mod_base = um
  modified_base 7: mod_base = OTHER; note = 2'- fluoro
  modified_base 8: mod_base = um
  modified_base 9: mod_base = um
  modified_base 10: mod_base = OTHER; note = 2'-O- methyl
  modified_base 11: mod_base = um
  modified_base 12: mod_base = um
  modified_base 13: mod_base = cm
  modified_base 14: mod_base = OTHER; note = 2'- fluoro
  modified_base 15: mod_base = OTHER; note = 2'-O- methyl
  modified_base 16: mod_base = OTHER; note = 2'- fluoro
  modified_base 17: mod_base = gm
  modified_base 18: mod_base = OTHER; note = 2'-O- methyl
  modified_base 19: mod_base = OTHER; note = 2'-O- methyl
  modified_base 20: mod_base = cm
  modified_base 21: mod_base = um
  modified_base 22: mod_base = cm
  modified_base 23: mod_base = um
attgcttttattccaagaactct

SEQ ID NO: 675 - RNA, 23 nt, synthetic construct
  source 1..23: mol_type = other RNA
  modified_base 1: mod_base = OTHER; note = 2'-O- methyl
  modified_base 2: mod_base = OTHER; note = 2'- fluoro
  modified_base 3: mod_base = um
  modified_base 4: mod_base = gm
  modified_base 5: mod_base = OTHER; note = 2'- fluoro
  modified_base 6: mod_base = um
  modified_base 7: mod_base = um
  modified_base 8: mod_base = um
  modified_base 9: mod_base = um
  modified_base 10: mod_base = OTHER; note = 2'-O- methyl
  modified_base 11: mod_base = um
  modified_base 12: mod_base = um
  modified_base 13: mod_base = cm
  modified_base 14: mod_base = OTHER; note = 2'- fluoro
  modified_base 15: mod_base = OTHER; note = 2'-O- methyl
  modified_base 16: mod_base = OTHER; note = 2'- fluoro
  modified_base 17: mod_base = gm
  modified_base 18: mod_base = OTHER; note = 2'-O- methyl
  modified_base 19: mod_base = OTHER; note = 2'-O- methyl
  modified_base 20: mod_base = cm
  modified_base 21: mod_base = um
  modified_base 22: mod_base = cm
  modified_base 23: mod_base = um
attgcttttattccaagaactct

SEQ ID NO: 676 - RNA, 23 nt, synthetic construct
  source 1..23: mol_type = other RNA
  modified_base 1: mod_base = OTHER; note = 2'-O- methyl
  modified_base 2: mod_base = OTHER; note = 2'- fluoro
  modified_base 3: mod_base = OTHER; note = 2'- fluoro
  modified_base 4: mod_base = gm
  modified_base 5: mod_base = OTHER; note = 2'- fluoro
  modified_base 6: mod_base = um
  modified_base 7: mod_base = um
  modified_base 8: mod_base = um
  modified_base 9: mod_base = um
  modified_base 10: mod_base = OTHER; note = 2'-O- methyl
  modified_base 11: mod_base = um
  modified_base 12: mod_base = OTHER; note = 2'- fluoro
  modified_base 13: mod_base = cm
  modified_base 14: mod_base = OTHER; note = 2'- fluoro
  modified_base 15: mod_base = OTHER; note = 2'-O- methyl
  modified_base 16: mod_base = OTHER; note = 2'- fluoro
  modified_base 17: mod_base = gm
  modified_base 18: mod_base = OTHER; note = 2'-O- methyl
  modified_base 19: mod_base = OTHER; note = 2'-O- methyl
  modified_base 20: mod_base = cm
  modified_base 21: mod_base = um
  modified_base 22: mod_base = cm
  modified_base 23: mod_base = um
attgcttttattccaagaactct

SEQ ID NO: 677 - RNA, 23 nt, synthetic construct
  source 1..23: mol_type = other RNA
  modified_base 1: mod_base = OTHER; note = 2'-O- methyl
  modified_base 2: mod_base = OTHER; note = 2'- fluoro
  modified_base 3: mod_base = um
  modified_base 4: mod_base = gm
  modified_base 5: mod_base = OTHER; note = 2'- deoxyribose
  modified_base 6: mod_base = um
  modified_base 7: mod_base = OTHER; note = 2'- deoxyribose
  modified_base 8: mod_base = um
  modified_base 9: mod_base = um
  modified_base 10: mod_base = OTHER; note = 2'-O- methyl
  modified_base 11: mod_base = um
  modified_base 12: mod_base = OTHER; note = 2'- fluoro
  modified_base 13: mod_base = cm
  modified_base 14: mod_base = OTHER; note = 2'- fluoro
  modified_base 15: mod_base = OTHER; note = 2'-O- methyl
  modified_base 16: mod_base = OTHER; note = 2'- fluoro
  modified_base 17: mod_base = gm
  modified_base 18: mod_base = OTHER; note = 2'-O- methyl
  modified_base 19: mod_base = OTHER; note = 2'-O- methyl
  modified_base 20: mod_base = cm
  modified_base 21: mod_base = um
  modified_base 22: mod_base = cm
  modified_base 23: mod_base = um
attgcttttattccaagaactct

SEQ ID NO: 678 - RNA, 23 nt, synthetic construct
  source 1..23: mol_type = other RNA
  modified_base 1: mod_base = OTHER; note = 2'-O- methyl
  modified_base 2: mod_base = OTHER; note = 2'- fluoro
  modified_base 3: mod_base = um
  modified_base 4: mod_base = gm
  modified_base 5: mod_base = OTHER; note = 2'- deoxyribose
  modified_base 6: mod_base = um
  modified_base 7: mod_base = um
  modified_base 8: mod_base = um
  modified_base 9: mod_base = um
  modified_base 10: mod_base = OTHER; note = 2'-O- methyl
  modified_base 11: mod_base = um
  modified_base 12: mod_base = OTHER; note = 2'- fluoro
  modified_base 13: mod_base = cm
  modified_base 14: mod_base = OTHER; note = 2'- fluoro
  modified_base 15: mod_base = OTHER; note = 2'-O- methyl
  modified_base 16: mod_base = OTHER; note = 2'- fluoro
  modified_base 17: mod_base = gm
  modified_base 18: mod_base = OTHER; note = 2'-O- methyl
  modified_base 19: mod_base = OTHER; note = 2'-O- methyl
  modified_base 20: mod_base = cm
  modified_base 21: mod_base = um
  modified_base 22: mod_base = cm
  modified_base 23: mod_base = um
attgcttttattccaagaactct

SEQ ID NO: 679 - RNA, 23 nt, synthetic construct
  source 1..23: mol_type = other RNA
  modified_base 1: mod_base = OTHER; note = 2'-O- methyl
  modified_base 2: mod_base = OTHER; note = 2'- fluoro
  modified_base 3: mod_base = um
  modified_base 4: mod_base = gm
  modified_base 5: mod_base = cm
  modified_base 6: mod_base = um
  modified_base 7: mod_base = OTHER; note = Glycerol nucleic acid
  modified_base 8: mod_base = um
  modified_base 9: mod_base = um
  modified_base 10: mod_base = OTHER; note = 2'-O- methyl
  modified_base 11: mod_base = um
  modified_base 12: mod_base = OTHER; note = 2'- fluoro
  modified_base 13: mod_base = cm
  modified_base 14: mod_base = OTHER; note = 2'- fluoro
  modified_base 15: mod_base = OTHER; note = 2'-O- methyl
  modified_base 16: mod_base = OTHER; note = 2'- fluoro
  modified_base 17: mod_base = gm
  modified_base 18: mod_base = OTHER; note = 2'-O- methyl
  modified_base 19: mod_base = OTHER; note = 2'-O- methyl
  modified_base 20: mod_base = cm
  modified_base 21: mod_base = um
  modified_base 22: mod_base = cm
  modified_base 23: mod_base = um
attgcttttattccaagaactct

SEQ ID NO: 680 - RNA, 21 nt, synthetic construct
  source 1..21: mol_type = other RNA
  modified_base 1: mod_base = OTHER; note = 2'-O- methyl
  modified_base 2: mod_base = gm
  modified_base 3: mod_base = um
  modified_base 4: mod_base = um
  modified_base 5: mod_base = cm
  modified_base 6: mod_base = um
  modified_base 7: mod_base = OTHER; note = 2'- fluoro
  modified_base 8: mod_base = gm
  modified_base 9: mod_base = OTHER; note = 2'- fluoro
  modified_base 10: mod_base = OTHER; note = 2'- fluoro
  modified_base 11: mod_base = OTHER; note = 2'- fluoro
  modified_base 12: mod_base = um
  modified_base 13: mod_base = OTHER; note = 2'- fluoro
  modified_base 14: mod_base = OTHER; note = 2'-O- methyl
  modified_base 15: mod_base = OTHER; note = 2'-O- methyl
  modified_base 16: mod_base = OTHER; note = 2'-O- methyl
  modified_base 17: mod_base = gm
  modified_base 18: mod_base = cm
  modified_base 19: mod_base = OTHER; note = 2'-O- methyl
  modified_base 20: mod_base = OTHER; note = 2'-O- methyl
  modified_base 21: mod_base = um
agttcttggaataaaagcaat

SEQ ID NO: 681 - RNA, 21 nt, synthetic construct
  source 1..21: mol_type = other RNA
  modified_base 1: mod_base = OTHER; note = 2'-O- methyl
  modified_base 2: mod_base = gm
  modified_base 3: mod_base = um
  modified_base 4: mod_base = um
  modified_base 5: mod_base = cm
  modified_base 6: mod_base = um
  modified_base 7: mod_base = OTHER; note = 2'- fluoro
  modified_base 8: mod_base = gm
  modified_base 9: mod_base = OTHER; note = 2'- fluoro
  modified_base 10: mod_base = OTHER; note = 2'- fluoro
  modified_base 11: mod_base = OTHER; note = 2'- fluoro
  modified_base 12: mod_base = um
  modified_base 13: mod_base = OTHER; note = 2'- fluoro
  modified_base 14: mod_base = OTHER; note = 2'-O- methyl
  modified_base 15: mod_base = OTHER; note = 2'- fluoro
  modified_base 16: mod_base = OTHER; note = 2'-O- methyl
  modified_base 17: mod_base = gm
  modified_base 18: mod_base = cm
  modified_base 19: mod_base = OTHER; note = 2'-O- methyl
  modified_base 20: mod_base = OTHER; note = 2'-O- methyl
  modified_base 21: mod_base = um
agttcttggaataaaagcaat

SEQ ID NO: 682 - RNA, 21 nt, synthetic construct
  source 1..21: mol_type = other RNA
  modified_base 1: mod_base = OTHER; note = 2'-O- methyl
  modified_base 2: mod_base = gm
  modified_base 3: mod_base = um
  modified_base 4: mod_base = um
  modified_base 5: mod_base = cm
  modified_base 6: mod_base = um
  modified_base 7: mod_base = um
  modified_base 8: mod_base = OTHER; note = 2'- fluoro
  modified_base 9: mod_base = OTHER; note = 2'- fluoro
  modified_base 10: mod_base = OTHER; note = 2'- fluoro
  modified_base 11: mod_base = OTHER; note = 2'- fluoro
  modified_base 12: mod_base = um
  modified_base 13: mod_base = OTHER; note = 2'-O- methyl
  modified_base 14: mod_base = OTHER; note = 2'-O- methyl
  modified_base 15: mod_base = OTHER; note = 2'-O- methyl
  modified_base 16: mod_base = OTHER; note = 2'-O- methyl
  modified_base 17: mod_base = gm
  modified_base 18: mod_base = cm
  modified_base 19: mod_base = OTHER; note = 2'-O- methyl
  modified_base 20: mod_base = OTHER; note = 2'-O- methyl
  modified_base 21: mod_base = um
agttcttggaataaaagcaat

SEQ ID NO: 683 - RNA, 21 nt, synthetic construct
  source 1..21: mol_type = other RNA
  modified_base 1: mod_base = OTHER; note = 2'-O- methyl
  modified_base 2: mod_base = gm
  modified_base 3: mod_base = um
  modified_base 4: mod_base = um
  modified_base 5: mod_base = cm
  modified_base 6: mod_base = um
  modified_base 7: mod_base = OTHER; note = 2'- fluoro
  modified_base 8: mod_base = gm
  modified_base 9: mod_base = OTHER; note = 2'- fluoro
  modified_base 10: mod_base = OTHER; note = 2'- fluoro
  modified_base 11: mod_base = OTHER; note = 2'- deoxyribose
  modified_base 12: mod_base = um
  modified_base 13: mod_base = OTHER; note = 2'-O- methyl
  modified_base 14: mod_base = OTHER; note = 2'-O- methyl
  modified_base 15: mod_base = OTHER; note = 2'-O- methyl
  modified_base 16: mod_base = OTHER; note = 2'-O- methyl
  modified_base 17: mod_base = gm
  modified_base 18: mod_base = cm
  modified_base 19: mod_base = OTHER; note = 2'-O- methyl
  modified_base 20: mod_base = OTHER; note = 2'-O- methyl
  modified_base 21: mod_base = um
agttcttggaataaaagcaat

SEQ ID NO: 684 - RNA, 23 nt, synthetic construct
  source 1..23: mol_type = other RNA
  modified_base 1: mod_base = OTHER; note = 2'-O- methyl
  modified_base 2: mod_base = OTHER; note = 2'- fluoro
  modified_base 3: mod_base = um
  modified_base 4: mod_base = gm
  modified_base 5: mod_base = OTHER; note = 2'- deoxyribose
  modified_base 6: mod_base = um
  modified_base 7: mod_base = OTHER; note = 2'- deoxyribose
  modified_base 8: mod_base = um
  modified_base 9: mod_base = um
  modified_base 10: mod_base = OTHER; note = 2'-O- methyl
  modified_base 11: mod_base = um
  modified_base 12: mod_base = um
  modified_base 13: mod_base = cm
  modified_base 14: mod_base = OTHER; note = 2'- fluoro
  modified_base 15: mod_base = OTHER; note = 2'-O- methyl
  modified_base 16: mod_base = OTHER; note = 2'- fluoro
  modified_base 17: mod_base = gm
  modified_base 18: mod_base = OTHER; note = 2'-O- methyl
  modified_base 19: mod_base = OTHER; note = 2'-O- methyl
  modified_base 20: mod_base = cm
  modified_base 21: mod_base = um
  modified_base 22: mod_base = cm
  modified_base 23: mod_base = um
attgcttttattccaagaactct

SEQ ID NO: 685 - RNA, 21 nt, synthetic construct
  source 1..21: mol_type = other RNA
  modified_base 1: mod_base = OTHER; note = 2'-O- methyl
  modified_base 2: mod_base = gm
  modified_base 3: mod_base = um
  modified_base 4: mod_base = um
  modified_base 5: mod_base = OTHER; note = 2'- fluoro
  modified_base 6: mod_base = um
  modified_base 7: mod_base = OTHER; note = 2'- fluoro
  modified_base 8: mod_base = gm
  modified_base 9: mod_base = OTHER; note = 2'- fluoro
  modified_base 10: mod_base = OTHER; note = 2'- fluoro
  modified_base 11: mod_base = OTHER; note = 2'- fluoro
  modified_base 12: mod_base = um
  modified_base 13: mod_base = OTHER; note = 2'- fluoro
  modified_base 14: mod_base = OTHER; note = 2'-O- methyl
  modified_base 15: mod_base = OTHER; note = 2'-O- methyl
  modified_base 16: mod_base = OTHER; note = 2'-O- methyl
  modified_base 17: mod_base = gm
  modified_base 18: mod_base = cm
  modified_base 19: mod_base = OTHER; note = 2'-O- methyl
  modified_base 20: mod_base = OTHER; note = 2'-O- methyl
  modified_base 21: mod_base = um
agttcttggaataaaagcaat

What is claimed is:

1. An siRNA for inhibiting ANGPTL4 gene expression, wherein the siRNA comprises a sense strand and an antisense strand, wherein the antisense strand comprises at least 17 continuous nucleotides that differ by no more than 4 nucleotides from the nucleotide sequence as shown in SEQ ID NO: 143, and the antisense strand is 17 to 30 nucleotides in length; the sense strand is 17 to 30 nucleotides in length and is at least partially complementary to the antisense strand.

2. The siRNA according to claim 1, wherein the antisense strand is 19 to 27 nucleotides in length, and the sense strand is 19 to 25 nucleotides in length;
preferably, the antisense strand is 19 to 23 nucleotides in length, and the sense strand is 19 to 21 nucleotides in length;
more preferably,
the antisense strand is 23 nucleotides in length, and the sense strand is 21 nucleotides in length; or
the antisense strand is 22 nucleotides in length, and the sense strand is 20 nucleotides in length; or
the antisense strand is 21 nucleotides in length, and the sense strand is 21 nucleotides in length; or
the antisense strand is 21 nucleotides in length, and the sense strand is 19 nucleotides in length; or
the antisense strand is 20 nucleotides in length, and the sense strand is 22 nucleotides in length; or
the antisense strand is 20 nucleotides in length, and the sense strand is 20 nucleotides in length; or
the antisense strand is 27 nucleotides in length, and the sense strand is 25 nucleotides in length; or
the antisense strand is 19 nucleotides in length, and the sense strand is 19 nucleotides in length.

3. The siRNA according to claim 1, wherein the antisense strand differs by no more than 3 nucleotides from the nucleotide sequence as shown in SEQ ID NO: 143;
preferably, the antisense strand differs by no more than 1 nucleotide from the nucleotide sequence as shown in SEQ ID NO: 143;
more preferably, the sequence of the antisense strand is the nucleotide sequence as shown in SEQ ID NO: 143.

4. The siRNA according to claim 1, wherein the sense strand has a mismatch of no more than 3 nucleotides with the antisense strand;
preferably, the sense strand has a mismatch of no more than 1 nucleotide with the antisense strand;
more preferably, the sense strand is fully complementary to the antisense strand;
further more preferably, there is an overhang of 2 nucleotides at the 3′ end of the sense strand; preferably, the 2 nucleotides are reverse complementary to the first two nucleotides at the corresponding position of the starting nucleotide of the sense strand in the transcript as shown in NCBI Accession No. NM 139314.3.

5. The siRNA according to claim 1, wherein the sequence of the siRNA is selected from the sequences of duplex 143, duplex 209, duplex 210, duplex 211, duplex 212, duplex 213, duplex 214, duplex 215, duplex 216, and duplex 217.

6. The siRNA according to claim 1, wherein the siRNA comprises at least one modified nucleotide.

7. The siRNA according to claim 1, wherein all of the nucleotides in the sense strand or the antisense strand are modified nucleotides or nucleotide analogs;
preferably, the modified nucleotide or nucleotide analog is selected from a 2′-methoxy nucleotide, a 2′-fluoro nucleotide, a 2′-deoxy nucleotide, a 2′,3′-seco nucleotide analog, a 2′-fluoroarabino nucleotide, a 2′-methoxyethyl nucleotide, a 2′-amino-modified nucleotide, a 2′-alkyl-modified nucleotide, a 3′-methoxy nucleotide, a 2′-allyl-modified nucleotide, a nucleotide comprising a phosphorothioate group, a nucleotide comprising a methylphosphonate group, a nucleotide comprising a 5′-phosphate, a nucleotide comprising a 5′-phosphate mimic, a glycol-modified nucleotide, an abasic nucleotide, a morpholino nucleotide, a threose nucleotide, a locked nucleotide, an unlocked nucleotide, a glycerol nucleotide, or a base-modified nucleotide.

8. The siRNA according to claim 1, wherein the 5′ and 3′ ends of the sense strand independently comprise 1 or 2 phosphorothioate linkages, respectively; and the 5′ and 3′ ends of the antisense strand independently comprise 1 or 2 phosphorothioate linkages, respectively;
preferably, there is a phosphorothioate linkage between nucleotides at positions 1 and 2 from the 5′ end of the sense strand, between nucleotides at positions 2 and 3 from the 5′ end of the sense strand, between nucleotides at positions 1 and 2 from the 3′ end of the antisense strand, between nucleotides at positions 2 and 3 from the 3′ end of the antisense strand, between nucleotides at positions 1 and 2 from the 5′ end of the antisense strand, and between nucleotides at positions 2 and 3 from the 5′ end of the antisense strand.

9. The siRNA according to claim 1, wherein the antisense strand of the siRNA has the following characteristics:
the antisense strand of the siRNA is 23 nucleotides in length, wherein the antisense strand comprises 3 to 10 2′-fluoro nucleotides (preferably at positions 2, 14, and 16; positions 2, 5, 14, and 16; positions 2, 6, 14, and 16; positions 2, 4, 6, 14, and 16; positions 2, 6, 9, 14, and 16; positions 2, 5, 6, 14, and 16; positions 2, 6, 10, 14, and 16; positions 2, 6, 12, 14, and 16; positions 2, 5, 10, 14, and 16; positions 2, 3, 12, 14, and 16; positions 2, 9, 12, 14, and 16; positions 2, 6, 8, 9, 14, and 16; positions 2, 3, 5, 12, 14, and 16; positions 2, 8, 9, 12, 14, and 16; positions 2, 7, 9, 12, 14, and 16; positions 2, 4, 6, 8, 10, 14, 16, 18 and 20; or positions 2, 4, 5, 6, 8, 10, 12, 14, 16, and 18 from the 5′ end), with the remaining positions being 2′-methoxy nucleotides; and the sense strand of the siRNA is 21 nucleotides in length, wherein positions 9, 10, and 11; positions 7, 9, 10, and 11; or positions 5, 7, 9, 10, and 11 from the 5′ end of the sense strand are 2′-fluoro nucleotides, optionally comprising a threose nucleotide at one position (preferably at position 1 from the 5′ end), optionally comprising a 2′-deoxy nucleotide at one position (preferably at position 7 from the 5′ end), with the remaining positions being 2′-methoxy nucleotides; or
the antisense strand of the siRNA is 21 nucleotides in length, wherein the antisense strand comprises 3 to 10 2′-fluoro nucleotides (preferably at positions 2, 6, 14, and 16 from the 5′ end), and the remaining positions are 2′-methoxy nucleotides; the sense strand is 19 nucleotides in length, wherein positions 7, 8, and 9 from the 5′ end of the sense strand are 2′-fluoro nucleotides; or
the antisense strand of the siRNA is 22 nucleotides in length, wherein the antisense strand comprises 3 to 10 2′-fluoro nucleotides (e.g., at positions 2, 6, 14, and 16 from the 5′ end), and the remaining positions are 2′-methoxy nucleotides; the sense strand is 20 nucleotides in length, wherein positions 6, 8, 9, and 10, or positions 8, 9, and 10 from the 5′ end are 2′-fluoro nucleotides;
preferably, the antisense strand of the siRNA is the nucleotide sequence as shown in SEQ ID NO: 143, and the sense strand of the siRNA is the nucleotide sequence as shown in SEQ ID NO: 354.

10. The siRNA according to claim 1, wherein the first nucleotide at the 5′ end of the antisense strand is an (E)-vinylphosphonate-modified nucleotide.

11. The siRNA according to claim 1, wherein the sequence of the siRNA is selected from the sequence of one of the modified duplexes 1 to 21 as shown in Table 3.

12. An siRNA conjugate, comprising the siRNA according to claim 1 and a conjugate molecule;
preferably, the conjugate molecule comprises a linker-targeting ligand, and the linker-targeting ligand comprises N-acetylgalactosamine; more preferably, the linker-targeting ligand is GalNAc (L96).

13. The siRNA conjugate according to claim 12, wherein the siRNA conjugate is selected from conjugates 1 to 242 as shown in Table 2;
preferably, the conjugate is selected from conjugate 1, conjugate 5, conjugate 15, conjugate 16, conjugate 17, conjugate 19, conjugate 21, conjugate 22, conjugate 23, conjugate 28, conjugate 92, conjugate 93, conjugate 120, conjugate 130, conjugate 133, conjugate 225, conjugate 227, conjugate 234, conjugate 235, conjugate 236, and conjugate 238 in Table 2.

14. A pharmaceutical composition, comprising the siRNA according to claim 1 or an siRNA conjugate comprising the siRNA, and a pharmaceutically acceptable carrier;
preferably, the pharmaceutical composition further comprises a second therapeutic agent; more preferably, the second therapeutic agent is an oligonucleotide; further more preferably, the second therapeutic agent is administered in the same or a different medicament as the siRNA or the conjugate.

15. A method for treating or preventing a pathological condition or disease associated with overexpression of angiopoietin-like 4 (ANGPTL4) gene, comprising administering to a subject in need thereof an effective amount of the siRNA according to claim 1, or an siRNA conjugate or pharmaceutical composition comprising the siRNA.

16. The method according to claim 15, wherein the pathological condition or disease is a disease associated with dyslipidemia; preferably, the disease associated with dyslipidemia is hyperlipidemia, hypertriglyceridemia, pancreatitis, familial chylomicronemia syndrome, diabetes, type 2 diabetes, heart disease, myocardial infarction, angina, or atherosclerosis.
